(19) United States
(12) Patent Application Publication
(10) Pub. No.: US 2008/0311111 A1
(43) Pub. Date: Dec. 18, 2008

(54) Competitive Domain Antibody Formats That Bind Interleukin 1 Receptor Type 1

(76) Inventors: Philip D. Drew, Cambridge (GB); Rudolf M.T. De Wildt, Cambridge (GB); Ian M. Tomlinson, Great Shelford (GB); Amrik Basran, Cambridge (GB)

Correspondence Address: MCDERMOTT WILL & EMERY LLP, 28 STATE STREET, BOSTON, MA, 02109-1775, US

(21) Appl. No.: 12/085,919

(22) PCT Filed: Nov. 30, 2006
(86) PCT No.: PCT/GB2006/004474

§ 371 Date: Jul. 21, 2008

Related U.S. Application Data
(60) Provisional application No. 60/742,218, filed on Dec. 1, 2005.

(51) Int. Cl. A61K 39/395; C07K 16/28; C12N 15/13; C12N 15/63; C12N 1/21; A61P 11/00; A61P 29/00; C12N 1/19; C12N 5/10; C12P 21/00

(52) U.S. Cl. 424/130.1; 530/389.1; 536/23.53; 435/320.1; 435/252.3; 435/254.11; 435/325; 435/69.6

(57) ABSTRACT

The invention relates to dAb monomers that bind IL-1R1 and inhibit binding of IL-1 (e.g., IL-1α and/or IL-1β) and IL-1ra to IL-1R1, and to ligands comprising such dAb monomers. The invention relates to protease resist and dAb monomers, and to ligands comprising protease resistant dAb monomers. The invention also relates to nucleic acids including vectors that encode the dAb monomers and ligand, to host cells that comprise the nucleic acids and to method for producing a dAb monomer or ligand. The invention also relates to pharmaceutical compositions that comprise the dAb monomers or ligands, and to therapeutic methods that comprise administering a dAb monomer of ligand.

### RELATED APPLICATION

[0001] This application claims the benefit of U.S. Provisional Application No. 60/742,218, filed on Dec. 1, 2005. The entire teachings of the above application are incorporated herein by reference.

### BACKGROUND OF THE INVENTION

[0002] Interleukin 1 (IL-1) is an important mediator of the immune response that has biological effects on several types of cells. Interleukin 1 binds to two receptors Interleukin 1 Receptor type 1 (IL-1R1, CD121a, p80), which transduces signal into cells upon binding IL-1, and Interleukin 1 Receptor type 2 (IL-1R1, CDw121b), which does not transduce signals upon binding IL-1 and acts as an endogenous regulator of IL-1. Another endogenous protein that regulates the interaction of IL-1 with IL-1R1 is Interleukin 1 receptor antagonist (IL-1ra). IL-1ra binds IL-1R1, but does not activate IL-1R1 to transducer signals.

[0003] Signals transduced through IL-1R1 upon binding IL-1 (e.g., IL-1α or IL-1β) induce a wide spectrum of biological activities that can be pathogenic. For example, signals transduced through IL-1R1 upon binding of IL-1 can lead to local or systemic inflammation, the elaboration of additional inflammatory mediators (e.g., IL-6, Il-8, TNF), fever, activate immune cells (e.g., lymphocytes, neutrophils), anorexia, hypotension, leucopenia, and thrombocytopenia. Signals transduced through IL-1R1 upon binding of IL-1 also have effects on non-immune cells, such as stimulating chondrocytes to release collagenase and other enzymes that degrade cartilage, and stimulating the differentiation of osteoclast progenitor cells into mature osteoclasts which leads to resorption of bone. (See, e.g., Hallegua and Weisman, Ann. Theum. Dis. 61:960-967 (2002).) Accordingly, the interaction of IL-1 with IL-1R1 has been implicated in the pathogenesis of several diseases such as arthritis (e.g., rheumatoid arthritis, osteoarthritis) and inflammatory bowel disease.

[0004] Certain agents that bind interleukin 1 Receptor Type 1 (IL-1R1) and neutralize its activity (e.g., IL-1ra) have proven to be effective therapeutic agents for certain inflammatory conditions, such as moderately to severely active rheumatoid arthritis. However, other agents that bind IL-1R1, such as the anti-IL-1R1 antibody AMG 108 (Amgen) have failed to meet primary endpoints in clinical studies.

[0005] A need exists for improved agents that antagonize IL-1R1 and methods for administering such agents to disease.

### SUMMARY OF THE INVENTION

[0006] The invention relates to domain antibody (dAb) monomers that bind IL-1R1 and inhibit binding of IL-1 (e.g., IL-1α and/or IL-1β) and IL-1ra to IL-1R1, and to ligands comprising such dAb monomers. Such ligands and dAb monomers are useful as therapeutic agents for treating inflammation, disease or other conditions mediated in whole or in part by biological functions induced by binding of IL-1 to IL-1R1 (e.g., local or systemic inflammation, elaboration of inflammatory mediators (e.g., IL-6, Il-8, TNF), fever, activation of immune cells (e.g., lymphocytes, neutrophils), anorexia, hypotension, leucopenia, thrombocytopenia.) The ligands or dAb monomers of the invention can bind IL-1R1 and inhibit IL-1R1 function, thereby providing therapeutic benefit.

[0007] In addition, ligands or dAb monomers of the invention can be used to detect measure or quantify IL-1R1, for example in a biological sample, for diagnostic or other purposes.

[0008] In one aspect, the invention relates to a domain antibody (dAb) monomer that has binding specificity for Interleukin-1 Receptor Type 1 (IL-1R1) and inhibits binding of Interleukin-1 (IL-1, e.g., Interleukin-1α (IL-1α) and/or Interleukin-1β (IL-1β)) and Interleukin-1 Receptor Antagonist (IL-1ra) to IL-1R1.

[0009] Preferably, the dAb monomer inhibits binding of IL-1 to IL-1R1 with an IC50 that is ≦1 μM. In some embodiments, the dAb monomer inhibits IL-1-induced release of Interleukin-8 by MRC-5 cells (ATCC Accession No. CCL-171) in an in vitro assay with a ND50 that is ≦1 μM, or preferably ≦1 nM. In other embodiments, the dAb monomer inhibits IL-1-induced release of Interleukin-6 in a whole blood assay with a ND50 that is ≦1 μM. In other embodiments, the dAb monomer inhibits IL-1-induced release of Interleukin-6 in a whole blood assay with a ND50 that is ≦1 μM.

[0010] One or more of the framework regions (FR) in the dAb monomer can comprise (a) the amino acid sequence of a human framework region, (b) at least 8 contiguous amino acids of the amino acid sequence of a human framework region, or (c) an amino acid sequence encoded by a human germline antibody gene segment, wherein said framework regions are as defined by Kabat.

[0011] The amino acid sequences of one or more framework regions in the dAb monomer can be the same as the amino acid sequence of a corresponding framework region encoded by a human germline antibody gene segment, or the amino acid sequences of one or more of said framework regions collectively comprise up to 5 amino acid differences relative to the corresponding framework regions encoded by a human germline antibody gene segment.

[0012] The amino acid sequences of FR1, FR2, FR3 and FR4 in the dAb monomer can be the same as the amino acid sequences of corresponding framework regions encoded by a human germline antibody gene segment, or the amino acid sequences of FR1, FR2, FR3 and FR4 collectively contain up to 10 amino acid differences relative to the corresponding framework regions encoded by a human germline antibody gene segment.

[0013] The dAb monomer can comprise FR1, FR2 and FR3 regions, and the amino acid sequence of said FR1, FR2 and FR3 can be the same as the amino acid sequences of corresponding framework regions encoded by a human germline antibody gene segment. In some embodiments, the human germline antibody gene segment is DPK9 and JK1.

[0014] In some embodiments, the dAb monomer competes for binding to IL-1R1 with a dAb selected from the group consisting DOM4-130-30 (SEQ ID NO:3), DOM4-130-46 (SEQ ID NO:4), DOM4-130-51 (SEQ ID NO:5), DOM4-130-53 (SEQ ID NO:6), DOM4-130-54 (SEQ ID NO:7), DOM4-130 (SEQ ID NO:215), DOM4-130-1 (SEQ ID NO:216), DOM4-130-2 (SEQ ID NO:217), DOM4-130-3 (SEQ ID NO:218), DOM4-130-4 (SEQ ID NO:219), DOM4-130-5 (SEQ ID NO:220), DOM4-130-6 (SEQ ID NO:221), DOM4-130-7 (SEQ ID NO:222), DOM4-130-8 (SEQ ID NO:223), DOM4-130-9 (SEQ ID NO:224), DOM4-130-10 (SEQ ID NO:225), DOM4-130-11 (SEQ ID NO:226), DOM4-130-12 (SEQ ID NO:227), DOM4-130-13 (SEQ ID NO:228), DOM4-130-14 (SEQ ID NO:229), DOM4-130-15 (SEQ ID NO:230), DOM4-130-16 (SEQ ID NO:231), DOM4-130-17 (SEQ ID NO:232), DOM4-130-18 (SEQ ID NO:233), DOM4-130-19 (SEQ ID NO:234), DOM4-130-20 (SEQ ID NO:235), DOM4-130-21 (SEQ ID NO:236), DOM4-130-22 (SEQ ID NO:237), DOM4-130-23 (SEQ ID NO:238), DOM4-130-24 (SEQ ID NO:239), DOM4-130-25 (SEQ ID NO:240), DOM4-130-26 (SEQ ID NO:241), DOM4-130-27 (SEQ ID NO:242), DOM4-130-28 (SEQ ID NO:243), DOM4-130-31 (SEQ ID NO:244), DOM4-130-32 (SEQ ID NO:245), DOM4-130-33 (SEQ ID NO:246), DOM4-130-34 (SEQ ID NO:247), DOM4-130-35 (SEQ ID NO:248), DOM4-130-36 (SEQ ID NO:249), DOM4-130-37 (SEQ ID NO:250), DOM4-130-38 (SEQ ID NO:251), DOM4-130-39 (SEQ ID NO:252), DOM4-130-40 (SEQ ID NO:253), DOM4-130-41 (SEQ ID NO:254), DOM4-130-42 (SEQ ID NO:255), DOM4-130-43 (SEQ ID NO:256), DOM4-130-44 (SEQ ID NO:257), DOM4-130-45 (SEQ ID NO:258), DOM4-130-46 (SEQ ID NO:259), DOM4-130-47 (SEQ ID NO:260), DOM4-130-48 (SEQ ID NO:261), DOM4-130-49 (SEQ ID NO:262), DOM4-130-50 (SEQ ID NO:263), DOM4-130-51 (SEQ ID NO:264), DOM4-130-52 (SEQ ID NO:265), DOM4-130-53 (SEQ ID NO:266), DOM4-130-54 (SEQ ID NO:267), DOM4-130-55 (SEQ ID NO:268), DOM4-130-56 (SEQ ID NO:269), DOM4-130-57 (SEQ ID NO:270), DOM4-130-58 (SEQ ID NO:271), DOM4-130-59 (SEQ ID NO:272), DOM4-130-60 (SEQ ID NO:273), DOM4-130-61 (SEQ ID NO:274), DOM4-130-62 (SEQ ID NO:275), DOM4-130-63 (SEQ ID NO:276), DOM4-130-64 (SEQ ID NO:277), DOM4-130-65 (SEQ ID NO:278), DOM4-130-66 (SEQ ID NO:279), DOM4-130-67 (SEQ ID NO:280), DOM4-130-68 (SEQ ID NO:281), DOM4-130-69 (SEQ ID NO:282), DOM4-130-70 (SEQ ID NO:283), DOM4-130-71 (SEQ ID NO:284), DOM4-130-72 (SEQ ID NO:285), DOM4-130-73 (SEQ ID NO:286), DOM4-130-74 (SEQ ID NO:287), DOM4-130-75 (SEQ ID NO:288), DOM4-130-76 (SEQ ID NO:289), DOM4-130-77 (SEQ ID NO:290), DOM4-130-78 (SEQ ID NO:291), DOM4-130-79 (SEQ ID NO:292), DOM4-130-80 (SEQ ID NO:293), DOM4-130-81 (SEQ ID NO:294), DOM4-130-82 (SEQ ID NO:295), DOM4-130-83 (SEQ ID NO:296), DOM4-130-84 (SEQ ID NO:297), DOM4-130-85 (SEQ ID NO:298), DOM4-130-86 (SEQ ID NO:299), DOM4-130-87 (SEQ ID NO:300), DOM4-130-88 (SEQ ID NO:301), DOM4-130-89 (SEQ ID NO:302), DOM4-130-90 (SEQ ID NO:303), DOM4-130-91 (SEQ ID NO:304), DOM4-130-92 (SEQ ID NO:305), DOM4-130-93 (SEQ ID NO:306), DOM4-130-94 (SEQ ID NO:307), DOM4-130-95 (SEQ ID NO:308), DOM4-130-96 (SEQ ID NO:309), DOM4-130-97 (SEQ ID NO:310), DOM4-130-98 (SEQ ID NO:311), DOM4-130-99 (SEQ ID NO:312), DOM4-130-100 (SEQ ID NO:313), DOM4-130-101 (SEQ ID NO:314), DOM4-130-102 (SEQ ID NO:315), DOM4-130-103 (SEQ ID NO:316), DOM4-130-104 (SEQ ID NO:317), DOM4-130-105 (SEQ ID NO:318), DOM4-130-106 (SEQ ID NO:319), DOM4-130-107 (SEQ ID NO:320), DOM4-130-108 (SEQ ID NO:321), DOM4-130-109 (SEQ ID NO:322), DOM4-130-110 (SEQ ID NO:323), DOM4-130-111 (SEQ ID NO:324), DOM4-130-112 (SEQ ID NO:325), DOM4-130-113 (SEQ ID NO:326), DOM4-130-114 (SEQ ID NO:327), DOM4-130-115 (SEQ ID NO:328), DOM4-130-116 (SEQ ID NO:329), DOM4-130-117 (SEQ ID NO:330), DOM4-130-118 (SEQ ID NO:331), DOM4-130-119 (SEQ ID NO:332), DOM4-130-120 (SEQ ID NO:333), DOM4-130-121 (SEQ ID NO:334), DOM4-130-122 (SEQ ID NO:335), DOM4-130-123 (SEQ ID NO:336), DOM4-130-124 (SEQ ID NO:337), DOM4-130-125 (SEQ ID NO:338), DOM4-130-126 (SEQ ID NO:339), DOM4-130-127 (SEQ ID NO:340), DOM4-130-128 (SEQ ID NO:341), DOM4-130-129 (SEQ ID NO:342), DOM4-130-130 (SEQ ID NO:343), DOM4-130-131 (SEQ ID NO:344), DOM4-130-132 (SEQ ID NO:345), DOM4-130-133 (SEQ ID NO:346), DOM4-1 (SEQ ID NO:8), DOM4-2 (SEQ ID NO:9), DOM4-3 (SEQ ID NO:10), DOM4-4 (SEQ ID NO:11), DOM4-5 (SEQ ID NO:12), DOM4-6 (SEQ ID NO:13), DOM4-7 (SEQ ID NO:14), DOM4-8 (SEQ ID NO:15), DOM4-9 (SEQ ID NO:16), DOM4-10 (SEQ ID NO:17), DOM4-11 (SEQ ID NO:18), DOM4-12 (SEQ ID NO:19), DOM4-13 (SEQ ID NO:20), DOM4-14 (SEQ ID NO:21), DOM4-15 (SEQ ID NO:22), DOM4-20 (SEQ ID NO:23), DOM4-21 (SEQ ID NO:24), DOM4-22 (SEQ ID NO:25), DOM4-23 (SEQ ID NO:26), DOM4-25 (SEQ ID NO:27), DOM4-26 (SEQ ID NO:28), DOM4-27 (SEQ ID NO:29), DOM4-28 (SEQ ID NO:30), DOM4-29 (SEQ ID NO:31), DOM4-31 (SEQ ID NO:32), DOM4-32 (SEQ ID NO:33), DOM4-33 (SEQ ID NO:34), DOM4-34 (SEQ ID NO:35), DOM4-36 (SEQ ID NO:36), DOM4-37 (SEQ ID NO:37), DOM4-38 (SEQ ID NO:38), DOM4-39 (SEQ ID NO:39), DOM4-40 (SEQ ID NO:40), DOM4-41 (SEQ ID NO:41), DOM4-42 (SEQ ID NO:42), DOM4-44 (SEQ ID NO:43), DOM4-45 (SEQ ID NO:44), DOM4-46 (SEQ ID NO:45), DOM4-49 (SEQ ID NO:46), DOM4-50 (SEQ ID NO:47), DOM4-74 (SEQ ID NO:48), DOM4-75 (SEQ ID NO:49), DOM4-76 (SEQ ID NO:50), DOM4-78 (SEQ ID NO:51), DOM4-79 (SEQ ID NO:52), DOM4-80 (SEQ ID NO:53), DOM4-81 (SEQ ID NO:54), DOM4-82 (SEQ ID NO:55), DOM4-83 (SEQ ID NO:56), DOM4-84 (SEQ ID NO:57), DOM4-85 (SEQ ID NO:58), DOM4-86 (SEQ ID NO:59), DOM4-87 (SEQ ID NO:60), DOM4-88 (SEQ ID NO:61), DOM4-89 (SEQ ID NO:62), DOM4-90 (SEQ ID NO:63), DOM4-91 (SEQ ID NO:64), DOM4-92 (SEQ ID NO:65), DOM4-93 (SEQ ID NO:66), DOM4-94 (SEQ ID NO:67), DOM4-95 (SEQ ID NO:68), DOM4-96 (SEQ ID NO:69), DOM4-97 (SEQ ID NO:70), DOM4-98 (SEQ ID NO:71), DOM4-99 (SEQ ID NO:72), DOM4-100 (SEQ ID NO:73), DOM4-101 (SEQ ID NO:74), DOM4-102 (SEQ ID NO:75), DOM4-103 (SEQ ID NO:76), DOM4-104 (SEQ ID NO:77), DOM4-105 (SEQ ID NO:78), DOM4-106 (SEQ ID NO:79), DOM4-107 (SEQ ID NO:80), DOM4-108 (SEQ ID NO:81), DOM4-109 (SEQ ID NO:82), DOM4-110 (SEQ ID NO:83), DOM4-111 (SEQ ID NO:84), DOM4-112 (SEQ ID NO:85), DOM4-113 (SEQ ID NO:86), DOM4-114 (SEQ ID NO:87), DOM4-115 (SEQ ID NO:88), DOM4-116 (SEQ ID NO:89), DOM4-117 (SEQ ID NO:90), DOM4-118 (SEQ ID NO:91), DOM4-119 (SEQ ID NO:92), DOM4-120 (SEQ ID NO:93), DOM4-121 (SEQ ID NO:94), DOM4-123 (SEQ ID NO:166), DOM4-124 (SEQ ID NO:167) DOM4-125 (SEQ ID NO:168), DOM4-126 (SEQ ID NO:169), DOM4-127 (SEQ ID NO:170), DOM4-128 (SEQ ID NO:171), DOM4-129 (SEQ ID NO:172), DOM4-129-1 (SEQ ID NO:173) DOM4-129-2 (SEQ ID NO:174), DOM4-129-3 (SEQ ID NO:175), DOM4-129-4 (SEQ ID NO:176), DOM4-129-5 (SEQ ID NO:177), DOM4-129-6 (SEQ ID NO:178), DOM4-129-7 (SEQ ID NO:179), DOM4-129-8 (SEQ ID NO:180), DOM4-129-9 (SEQ ID NO:181), DOM4-129-10 (SEQ ID NO:182), DOM4-129-11 (SEQ ID NO:183), DOM4-129-12 (SEQ ID NO:184), DOM4-129-13 (SEQ ID NO:185), DOM4-129-14 (SEQ ID NO:186), DOM4-129-15 (SEQ ID NO:187), DOM4-129-16 (SEQ ID NO:188), DOM4-129-17 (SEQ ID NO:189), DOM4-129-18 (SEQ ID NO:190), DOM4-129-19 (SEQ ID NO:191), DOM4-129-20 (SEQ ID NO:192), DOM4-129-21 (SEQ ID NO:193), DOM4-129-22 (SEQ ID NO:194), DOM4-129-23 (SEQ ID NO:195), DOM4-129-24 (SEQ ID NO:196), DOM4-129-25 (SEQ ID NO:197), DOM4-129-26 (SEQ ID NO:198), DOM4-129-27 (SEQ ID NO:199), DOM4-129-28 (SEQ ID NO:200), DOM4-129-29 (SEQ ID NO:201), DOM4-129-31 (SEQ ID NO:202), DOM4-129-32 (SEQ ID NO:203), DOM4-129-33 (SEQ ID NO:204), DOM4-129-34 (SEQ ID NO:205), DOM4-129-35 (SEQ ID NO:206), DOM4-129-37 (SEQ ID NO:207), DOM4-129-38 (SEQ ID NO:208), DOM4-129-39 (SEQ ID NO:209), DOM4-129-40 (SEQ ID NO:210), DOM4-129-41 (SEQ ID NO:211), DOM4-129-42 (SEQ ID NO:212), DOM4-129-43 (SEQ ID NO:213), DOM4-129-44 (SEQ ID NO:214), DOM4-131 (SEQ ID NO:347), DOM4-132 (SEQ ID NO:348), and DOM4-133 (SEQ ID NO:349).

[0015] Preferably, the dAb monomer competes for binding to IL-1R1 with a dAb selected from the group consisting of DOM4-130-30 (SEQ ID NO:3), DOM4-130-46 (SEQ ID NO:4), DOM4-130-51 (SEQ ID NO:5), DOM4-130-53 (SEQ ID NO:6), DOM4-130-54 (SEQ ID NO:7), DOM4-130 (SEQ ID NO:215), DOM4-130-1 (SEQ ID NO:216), DOM4-130-2 (SEQ ID NO:217), DOM4-130-3 (SEQ ID NO:218), DOM4-130-4 (SEQ ID NO:219), DOM4-130-5 (SEQ ID NO:220), DOM4-130-6 (SEQ ID NO:221), DOM4-130-7 (SEQ ID NO:222), DOM4-130-8 (SEQ ID NO:223), DOM4-130-9 (SEQ ID NO:224), DOM4-130-10 (SEQ ID NO:225), DOM4-130-11 (SEQ ID NO:226), DOM4-130-12 (SEQ ID NO:227), DOM4-130-13 (SEQ ID NO:228), DOM4-130-14 (SEQ ID NO:229), DOM4-130-15 (SEQ ID NO:230), DOM4-130-16 (SEQ ID NO:231), DOM4-130-17 (SEQ ID NO:232), DOM4-130-18 (SEQ ID NO:233), DOM4-130-19 (SEQ ID NO:234), DOM4-130-20 (SEQ ID NO:235), DOM4-130-21 (SEQ ID NO:236), DOM4-130-22 (SEQ ID NO:237), DOM4-130-23 (SEQ ID NO:238), DOM4-130-24 (SEQ ID NO:239), DOM4-130-25 (SEQ ID NO:240), DOM4-130-26 (SEQ ID NO:241), DOM4-130-27 (SEQ ID NO:242), DOM4-130-28 (SEQ ID NO:243), DOM4-130-31 (SEQ ID NO:244), DOM4-130-32 (SEQ ID NO:245), DOM4-130-33 (SEQ ID NO:246), DOM4-130-34 (SEQ ID NO:247), DOM4-130-35 (SEQ ID NO:248), DOM4-130-36 (SEQ ID NO:249), DOM4-130-37 (SEQ ID NO:250), DOM4-130-38 (SEQ ID NO:251), DOM4-130-39 (SEQ ID NO:252), DOM4-130-40 (SEQ ID NO:253), DOM4-130-41 (SEQ ID NO:254), DOM4-130-42 (SEQ ID NO:255), DOM4-130-43 (SEQ ID NO:256), DOM4-130-44 (SEQ ID NO:257), DOM4-130-45 (SEQ ID NO:258), DOM4-130-46 (SEQ ID NO:259), DOM4-130-47 (SEQ ID NO:260), DOM4-130-48 (SEQ ID NO:261), DOM4-130-49 (SEQ ID NO:262), DOM4-130-50 (SEQ ID NO:263), DOM4-130-51 (SEQ ID NO:264), DOM4-130-52 (SEQ ID NO:265), DOM4-130-53 (SEQ ID NO:266), DOM4-130-54 (SEQ ID NO:267), DOM4-130-55 (SEQ ID NO:268), DOM4-130-56 (SEQ ID NO:269), DOM4-130-57 (SEQ ID NO:270), DOM4-130-58 (SEQ ID NO:271), DOM4-130-59 (SEQ ID NO:272), DOM4-130-60 (SEQ ID NO:273), DOM4-130-61 (SEQ ID NO:274), DOM4-130-62 (SEQ ID NO:275), DOM4-130-63 (SEQ ID NO:276), DOM4-130-64 (SEQ ID NO:277), DOM4-130-65 (SEQ ID NO:278), DOM4-130-66 (SEQ ID NO:279), DOM4-130-67 (SEQ ID NO:280), DOM4-130-68 (SEQ ID NO:281), DOM4-130-69 (SEQ ID NO:282), DOM4-130-70 (SEQ ID NO:283), DOM4-130-71 (SEQ ID NO:284), DOM4-130-72 (SEQ ID NO:285), DOM4-130-73 (SEQ ID NO:286), DOM4-130-74 (SEQ ID NO:287), DOM4-130-75 (SEQ ID NO:288), DOM4-130-76 (SEQ ID NO:289), DOM4-130-77 (SEQ ID NO:290), DOM4-130-78 (SEQ ID NO:291), DOM4-130-79 (SEQ ID NO:292), DOM4-130-80 (SEQ ID NO:293), DOM4-130-81 (SEQ ID NO:294), DOM4-130-82 (SEQ ID NO:295), DOM4-130-83 (SEQ ID NO:296), DOM4-130-84 (SEQ ID NO:297), DOM4-130-85 (SEQ ID NO:298), DOM4-130-86 (SEQ ID NO:299), DOM4-130-87 (SEQ ID NO:300), DOM4-130-88 (SEQ ID NO:301), DOM4-130-89 (SEQ ID NO:302), DOM4-130-90 (SEQ ID NO:303), DOM4-130-91 (SEQ ID NO:304), DOM4-130-92 (SEQ ID NO:305), DOM4-130-93 (SEQ ID NO:306), DOM4-130-94 (SEQ ID NO:307), DOM4-130-95 (SEQ ID NO:308), DOM4-130-96 (SEQ ID NO:309), DOM4-130-97 (SEQ ID NO:310), DOM4-130-98 (SEQ ID NO:311), DOM4-130-99 (SEQ ID NO:312), DOM4-130-100 (SEQ ID NO:313), DOM4-130-101 (SEQ ID NO:314), DOM4-130-102 (SEQ ID NO:315), DOM4-130-103 (SEQ ID NO:316), DOM4-130-104 (SEQ ID NO:317), DOM4-130-105 (SEQ ID NO:318), DOM4-130-106 (SEQ ID NO:319), DOM4-130-107 (SEQ ID NO:320), DOM4-130-108 (SEQ ID NO:321), DOM4-130-109 (SEQ ID NO:322), DOM4-130-110 (SEQ ID NO:323), DOM4-130-111 (SEQ ID NO:324), DOM4-130-112 (SEQ ID NO:325), DOM4-130-113 (SEQ ID NO:326), DOM4-130-114 (SEQ ID NO:327), DOM4-130-115 (SEQ ID NO:328), DOM4-130-116 (SEQ ID NO:329), DOM4-130-117 (SEQ ID NO:330), DOM4-130-118 (SEQ ID NO:331), DOM4-130-119 (SEQ ID NO:332), DOM4-130-120 (SEQ ID NO:333), DOM4-130-121 (SEQ ID NO:334), DOM4-130-122 (SEQ ID NO:335), DOM4-130-123 (SEQ ID NO:336), DOM4-130-124 (SEQ ID NO:337), DOM4-130-125 (SEQ ID NO:338), DOM4-130-126 (SEQ ID NO:339), DOM4-130-127 (SEQ ID NO:340), DOM4-130-128 (SEQ ID NO:341), DOM4-130-129 (SEQ ID NO:342), DOM4-130-130 (SEQ ID NO:343), DOM4-130-131 (SEQ ID NO:344), DOM4-130-132 (SEQ ID NO:345), and DOM4-130-133 (SEQ ID NO:346).

[0016] In other embodiments, the dAb monomer comprises an amino acid sequence that has at least about 90% amino acid sequence identity with the amino acid sequence of a dAb selected from the group consisting of DOM4-130-30 (SEQ ID NO:3), DOM4-130-46 (SEQ ID NO:4), DOM4-130-51 (SEQ ID NO:5), DOM4-130-53 (SEQ ID NO:6), DOM4-130-54 (SEQ ID NO:7), DOM4-130 (SEQ ID NO:215), DOM4-130-1 (SEQ ID NO:216), DOM4-130-2 (SEQ ID NO:217), DOM4-130-3 (SEQ ID NO:218), DOM4-130-4 (SEQ ID NO:219), DOM4-130-5 (SEQ ID NO:220), DOM4-130-6 (SEQ ID NO:221), DOM4-130-7 (SEQ ID NO:222), DOM4-130-8 (SEQ ID NO:223), DOM4-130-9 (SEQ ID NO:224), DOM4-130-10 (SEQ ID NO:225), DOM4-130-11 (SEQ ID NO:226), DOM4-130-12 (SEQ ID NO:227), DOM4-130-13 (SEQ ID NO:228), DOM4-130-14 (SEQ ID NO:229), DOM4-130-15 (SEQ ID NO:230), DOM4-130-16 (SEQ ID NO:231), DOM4-130-17 (SEQ ID NO:232), DOM4-130-18 (SEQ ID NO:233), DOM4-130-19 (SEQ ID NO:234), DOM4-130-20 (SEQ ID NO:235), DOM4-130-21 (SEQ ID NO:236), DOM4-130-22 (SEQ ID NO:237), DOM4-130-23 (SEQ ID NO:238), DOM4-130-24 (SEQ ID NO:239), DOM4-130-25 (SEQ ID NO:240), DOM4-130-26 (SEQ ID NO:241), DOM4-130-27 (SEQ ID NO:242), DOM4-130-28 (SEQ ID NO:243), DOM4-130-31 (SEQ ID NO:244), DOM4-130-32 (SEQ ID NO:245), DOM4-130-33 (SEQ ID NO:246), DOM4-130-34 (SEQ ID NO:247), DOM4-130-35 (SEQ ID NO:248), DOM4-130-36 (SEQ ID NO:249), DOM4-130-37 (SEQ ID NO:250), DOM4-130-38 (SEQ ID NO:251), DOM4-130-39 (SEQ ID NO:252), DOM4-130-40 (SEQ ID NO:253), DOM4-130-41 (SEQ ID NO:254), DOM4-130-42 (SEQ ID NO:255), DOM4-130-43 (SEQ ID NO:256), DOM4-130-44 (SEQ ID NO:257), DOM4-130-45 (SEQ ID NO:258), DOM4-130-46 (SEQ ID NO:259), DOM4-130-47 (SEQ ID NO:260), DOM4-130-48 (SEQ ID NO:261), DOM4-130-49 (SEQ ID NO:262), DOM4-130-50 (SEQ ID NO:263), DOM4-130-51 (SEQ ID NO:264), DOM4-130-52 (SEQ ID NO:265), DOM4-130-53 (SEQ ID NO:266), DOM4-130-54 (SEQ ID NO:267), DOM4-130-55 (SEQ ID NO:268), DOM4-130-56 (SEQ ID NO:269), DOM4-130-57 (SEQ ID NO:270), DOM4-130-58 (SEQ ID NO:271), DOM4-130-59 (SEQ ID NO:272), DOM4-130-60 (SEQ ID NO:273), DOM4-130-61 (SEQ ID NO:274), DOM4-130-62 (SEQ ID NO:275), DOM4-130-63 (SEQ ID NO:276), DOM4-130-64 (SEQ ID NO:277), DOM4-130-65 (SEQ ID NO:278), DOM4-130-66 (SEQ ID NO:279), DOM4-130-67 (SEQ ID NO:280), DOM4-130-68 (SEQ ID NO:281), DOM4-130-69 (SEQ ID NO:282), DOM4-130-70 (SEQ ID NO:283), DOM4-130-71 (SEQ ID NO:284), DOM4-130-72 (SEQ ID NO:285), DOM4-130-73 (SEQ ID NO:286), DOM4-130-74 (SEQ ID NO:287), DOM4-130-75 (SEQ ID NO:288), DOM4-130-76 (SEQ ID NO:289), DOM4-130-77 (SEQ ID NO:290), DOM4-130-78 (SEQ ID NO:291), DOM4-130-79 (SEQ ID NO:292), DOM4-130-80 (SEQ ID NO:293), DOM4-130-81 (SEQ ID NO:294), DOM4-130-82 (SEQ ID NO:295), DOM4-130-83 (SEQ ID NO:296), DOM4-130-84 (SEQ ID NO:297), DOM4-130-85 (SEQ ID NO:298), DOM4-130-86 (SEQ ID NO:299), DOM4-130-87 (SEQ ID NO:300), DOM4-130-88 (SEQ ID NO:301), DOM4-130-89 (SEQ ID NO:302), DOM4-130-90 (SEQ ID NO:303), DOM4-130-91 (SEQ ID NO:304), DOM4-130-92 (SEQ ID NO:305), DOM4-130-93 (SEQ ID NO:306), DOM4-130-94 (SEQ ID NO:307), DOM4-130-95 (SEQ ID NO:308), DOM4-130-96 (SEQ ID NO:309), DOM4-130-97 (SEQ ID NO:310), DOM4-130-98 (SEQ ID NO:311), DOM4-130-99 (SEQ ID NO:312), DOM4-130-100 (SEQ ID NO:313), DOM4-130-101 (SEQ ID NO:314), DOM4-130-102 (SEQ ID NO:315), DOM4-130-103 (SEQ ID NO:316), DOM4-130-104 (SEQ ID NO:317), DOM4-130-105 (SEQ ID NO:318), DOM4-130-106 (SEQ ID NO:319), DOM4-130-107 (SEQ ID NO:320), DOM4-130-108 (SEQ ID NO:321), DOM4-130-109 (SEQ ID NO:322), DOM4-130-110 (SEQ ID NO:323), DOM4-130-111 (SEQ ID NO:324), DOM4-130-112 (SEQ ID NO:325), DOM4-130-113 (SEQ ID NO:326), DOM4-130-114 (SEQ ID NO:327), DOM4-130-115 (SEQ ID NO:328), DOM4-130-116 (SEQ ID NO:329), DOM4-130-117 (SEQ ID NO:330), DOM4-130-118 (SEQ ID NO:331), DOM4-130-119 (SEQ ID NO:332), DOM4-130-120 (SEQ ID NO:333), DOM4-130-121 (SEQ ID NO:334), DOM4-130-122 (SEQ ID NO:335), DOM4-130-123 (SEQ ID NO:336), DOM4-130-124 (SEQ ID NO:337), DOM4-130-125 (SEQ ID NO:338), DOM4-130-126 (SEQ ID NO:339), DOM4-130-127 (SEQ ID NO:340), DOM4-130-128 (SEQ ID NO:341), DOM4-130-129 (SEQ ID NO:342), DOM4-130-130 (SEQ ID NO:343), DOM4-130-131 (SEQ ID NO:344), DOM4-130-132 (SEQ ID NO:345), and DOM4-130-133 (SEQ ID NO:346).

[0017] Preferably, the dAb monomer binds human IL-1R1 with an affinity (KD) of about 300 nM to about 5 pM, as determined by surface plasmon resonance.

[0018] In another aspect, the invention relates to a ligand comprising a dAb monomer that has binding specificity for Interleukin-1 Receptor Type 1 (IL-1R1) and inhibits binding of Interleukin-1 (IL-1, e.g., Interleukin-1α (IL-1α) and/or Interleukin-1β (IL-1β)) and Interleukin-1 Receptor Antagonist (IL-1ra) to IL-1R1, and a half-life extending moiety. The half-life extending moiety can be a polyalkylene glycol moiety, serum albumin or a fragment thereof, transferrin receptor or a transferrin-binding portion thereof, or an antibody or antibody fragment comprising a binding site for a polypeptide that enhances half-life in vivo. In some embodiments, the half-life extending moiety is an antibody or antibody fragment comprising a binding site for serum albumin or neonatal Fc receptor. In particular embodiments, the half-life extending moiety is an immunoglobulin single variable domain that competes with an anti-serum albumin dAb disclosed herein for binding to human serum albumin. In other particular embodiments, the half-life extending moiety is an immunoglobulin single variable domain that comprises an amino acid sequence that has at least 90% amino acid sequence identity with the amino acid sequence of an anti-serum albumin dAb disclosed herein.

[0019] In more particular embodiments, the invention is a ligand comprising a dAb monomer that has binding specificity for IL-1R1 and inhibits binding of IL-1 to the receptor but does not inhibit binding of IL-1ra to IL-1R1, wherein said dAb monomer is selected from the group consisting of DOM4-130-30, DOM4-130-46, DOM4-130-51, DOM4-130-53, and DOM4-130-54. The ligand can be, for example, a dAb monomer, or a homodimer, homotrimer or homooligomer of said dAb monomer. The ligand can further comprise a dAb monomer that binds serum albumin, such as DOM7h-8. For example, in some embodiments, the ligand comprises of DOM4-130-54 and DOM7h-8.

[0020] In other particular embodiments, the invention is a ligand comprising a dAb monomer that has binding specificity for IL-1R1 and inhibits binding of IL-1 and IL-1ra to IL-1R1, and a dAb monomer that has binding specificity for tumor necrosis factor receptor 1 (TNFR1). If desired, the ligand can further comprise a half-life extending moiety.

[0021] Preferably, the dAb monomer that has binding specificity for TNFR1 competes for binding to TNFR1 with an anti-TNFR1 dAb described herein. In some embodiments, the dAb monomer that has binding specificity for TNFR1 comprises an amino acid sequence that has at least about 90% amino acid sequence identity with an amino acid sequence of an anti-TNFR1 dAb described herein.

[0022] The invention also relates to an isolated or recombinant nucleic acid encoding a dAb monomer or ligand, and to vectors (e.g., expression vectors) that comprise the recombinant nucleic acid. The invention also relates to a host cell comprising a recombinant nucleic acid or vector, and to a method of producing a ligand or dAb monomer that comprises maintaining a host cell of the invention under conditions suitable for expression of the nucleic acid that encodes a ligand or dAb monomer of the invention.

[0023] The invention also relates to pharmaceutical compositions comprising a dAb monomer or ligand and a physiologically acceptable carrier. For example, a pharmaceutical composition for intravenous, intramuscular, intraperitoneal, intraarterial, intrathecal, intraarticular, subcutaneous. pulmonary, intranasal, vaginal, or rectal administration.

[0024] The invention also relates to a drug delivery device comprising the pharmaceutical composition of the invention. For example, the drug delivery device can be a parenteral delivery device, intravenous delivery device, intramuscular delivery device, intraperitoneal delivery device, transdermal delivery device, pulmonary delivery device, intraarterial delivery device, intrathecal delivery device, intraarticular delivery device, subcutaneous delivery device, intranasal delivery device, vaginal delivery device, or rectal delivery device. Examples of such delivery devices, include a syringe, a transdermal delivery device (e.g., a patch), a capsule, a tablet, a nebulizer, an inhaler, an atomizer, an aerosolizer, a mister, a dry powder inhaler, a metered dose inhaler, a metered dose sprayer, a metered dose mister, a metered dose atomizer, and a catheter.

[0025] The invention also relates to a method for treating an inflammatory disease comprising administering to a subject in need thereof, a therapeutically effective amount of a dAb monomer or ligand of the invention.

[0026] The invention also relates to a dAb monomer or ligand of the invention for use in therapy, diagnosis and/or prophylaxis, and to the use of a dAb monomer or ligand of the invention for the manufacture of a medicament for treating a disease described herein (e.g., an inflammatory disease, arthritis, a respiratory disease).

[0027] The invention also relates to a method for treating a disease (e.g., an inflammatory disease, arthritis, a respiratory disease) comprising administering to a subject in need thereof a therapeutically effective amount of a dAb monomer that is resistant to protease degradation.

[0028] The invention also relates a dAb monomer that is resistant to protease degradation for use in therapy, diagnosis or prophylaxis, and to the use of such a dAb monomer of the invention for the manufacture of a medicament for treating a disease described herein (e.g., an inflammatory disease, arthritis, a respiratory disease).

### BRIEF DESCRIPTION OF THE DRAWINGS

[0029] FIG. 1 is a graph showing the results of an in vitro assay in which dAbs were tested for the ability to inhibit IL-1-induced IL-8 release from cultured MRC-5 cells (ATCC catalogue no. CCL-171). FIG. 1 shows a typical dose-response curve for an anti-IL-1R1 dAb referred to as DOM4-130 in such a cell assay. The ND₅₀ of DOM4-130 in the assay was approximately 500-1000 nM.

[0030] FIGS. 2 and 3 are graphs showing the results of in vitro assays in which dabs that underwent affinity maturation were tested for the ability to inhibit IL-1-induced IL-8 release from cultured MRC-5 cells (ATCC catalogue no. CCL-171). FIG. 2 shows a dose-response curve for DOM4-130-3, which is an affinity matured variant of DOM4-130. The ND₅₀ for DOM4-130-3 in the assay was about 30 nM, compared to the ND50 for DOM4-130 which was 500-1000 nM (see FIG. 1). FIG. 3 shows a dose-response curve for DOM4-130-46 and DOM4-130-51, which are affinity matured variants of DOM4-130, and for interleukin 1 receptor antagonist (IL-1ra). The ND₅₀ for DOM4-130-46 was about 1 nM in the assay, and the ND₅₀ for DOM4-130-51 about 300 pM).

[0031] FIGS. 4A and 4B are sensograms showing that neither DOM4-130-3 (FIG. 4A) nor IL-1α (FIG. 4B) bound to IL-1R1 to which IL-1ra was already bound. IL-1ra was injected over immobilized IL-1R1 and bound to the immobilized receptor. (Injection 1, from 0-60 seconds in FIGS. 4A and 4B.) Then, either DOM4-130-3 or IL-1a was injected. (Injection 2, from 60-120 seconds in FIGS. 4A and 4B.) As seen in the sensograms, neither DOM4-130-3 nor IL-1α bound to IL-1R1 to which IL-1ra was already bound.

[0032] FIG. 5 is a graph showing that increasing concentrations of DOM4-130-3 or IL-1α inhibited binding of IL-1ra to IL-1R1 in a competitive binding ELISA. Increasing concentrations of DOM4-130-3 or IL-1α were mixed with 500 pM IL-1ra, and the mixture was applied to an ELISA plate that was coated with IL-1R1.

[0033] FIG. 6 is a graph showing the results of an in vitro assay in which dAbs were tested for the ability to inhibit IL-1-induced IL-6 release in human whole blood.

[0034] FIG. 7A-7Z illustrates the amino acid sequences of several human dAbs that bind human IL-1R1. In some of the sequences, the amino acids of CDR1, CDR2 and CDR3 are underlined.

[0035] FIGS. 8A-8Z, 8AA-8ZZ, 8AAA and 8BBB illustrates the nucleotide sequences of nucleic acids that encode the human dAbs shown in FIG. 7A-7Z. In some of the sequences, the nucleotides encoding CDR1, CDR2 and CDR3 are underlined.

[0036] FIG. 9A is an alignment of the amino acid sequences of three Vκs selected by binding to mouse serum albumin (MSA). The aligned amino acid sequences are from Vκs designated MSA16, which is also referred to as DOM7m-16 (SEQ ID NO:723), MSA 12, which is also referred to as DOM7m-12 (SEQ ID NO:724), and MSA 26, which is also referred to as DOM7m-26 (SEQ ID NO:725).

[0037] FIG. 9B is an alignment of the amino acid sequences of six Vκs selected by binding to rat serum albumin (RSA). The aligned amino acid sequences are from Vκs designated DOM7r-1 (SEQ ID NO:726), DOM7r-3 (SEQ ID NO:727), DOM7r-4 (SEQ ID NO:728), DOM7r-5 (SEQ ID NO:729), DOM7r-7 (SEQ ID NO:730), and DOM7r-8 (SEQ ID NO:731).

[0038] FIG. 9C is an alignment of the amino acid sequences of six Vκs selected by binding to human serum albumin (HSA). The aligned amino acid sequences are from Vκs designated DOM7h-2 (SEQ ID NO:732), DOM7h-3 (SEQ ID NO:733), DOM7h-4 (SEQ ID NO:734), DOM7h-6 (SEQ ID NO:735), DOM7h-1 (SEQ ID NO:736), and DOM7h-7 (SEQ ID NO:737).

[0039] FIG. 9D is an alignment of the amino acid sequences of seven V_{H}s selected by binding to human serum albumin and a consensus sequence (SEQ ID NO:738). The aligned sequences are from V_{H}s designated DOM7h-22 (SEQ ID NO:739), DOM7h-23 (SEQ ID NO:740), DOM7h-24 (SEQ ID NO:741), DOM7h-25 (SEQ ID NO:742), DOM7h-26 (SEQ ID NO:743), DOM7h-21 (SEQ ID NO:744), and DOM7h-27 (SEQ ID NO:745).

[0040] FIG. 9E is an alignment of the amino acid sequences of three Vκs selected by binding to human serum albumin and rat serum albumin. The aligned amino acid sequences are from Vκs designated DOM7h-8 (SEQ ID NO:746), DOM7r-13 (SEQ ID NO:747), and DOM7r-14 (SEQ ID NO:748).

[0041] FIG. 10 is an illustration of the amino acid sequences of Vκs selected by binding to rat serum albumin (RSA). The illustrated sequences are from Vκs designated DOM7r-15 (SEQ ID NO:749), DOM7r-16 (SEQ ID NO:750), DOM7r-17 (SEQ ID NO:751), DOM7r-18 (SEQ ID NO:752), DOM7r-19 (SEQ ID NO:753).

[0042] FIG. 11A-11B is an illustration of the amino acid sequences of the amino acid sequences of V_{H}s that bind rat serum albumin (RSA). The illustrated sequences are from V_{H}s designated DOM7r-20 (SEQ ID NO:754), DOM7r-21 (SEQ ID NO:755), DOM7r-22 (SEQ ID NO:756), DOM7r-23 (SEQ ID NO:757), DOM7r-24 (SEQ ID NO:758), DOM7r-25 (SEQ ID NO:759), DOM7r-26 (SEQ ID NO:760), DOM7r-27 (SEQ ID NO:761), DOM7r-28 (SEQ ID NO:762), DOM7r-29 (SEQ ID NO:763), DOM7r-30 (SEQ ID NO:764), DOM7r-31 (SEQ ID NO:765), DOM7r-32 (SEQ ID NO:766), and DOM7r-33 (SEQ ID NO:767).

[0043] FIG. 12 illustrates the amino acid sequences of several Camelid V_{HH}s that bind mouse serum albumin that are disclosed in WO 2004/041862. Sequence A (SEQ ID NO:768), Sequence B (SEQ ID NO:769), Sequence C (SEQ ID NO:770), Sequence D (SEQ ID NO:771), Sequence E (SEQ ID NO:772), Sequence F (SEQ ID NO:773), Sequence G (SEQ ID NO:774), Sequence H (SEQ ID NO:775), Sequence I (SEQ ID NO:776), Sequence J (SEQ ID NO:777), Sequence K (SEQ ID NO:778), Sequence L (SEQ ID NO:779), Sequence M (SEQ ID NO:780), Sequence N (SEQ ID NO:781), Sequence O (SEQ ID NO:782), Sequence P (SEQ ID NO:783), Sequence Q (SEQ ID NO:784).

[0044] FIG. 13A-13V illustrates the amino acid sequences of several human immunoglobulin variable domains that have binding specificity for human TNFR1. The presented amino acid sequences are continuous with no gaps; the symbol ˜ has been inserted into the sequences to indicate the locations of the complementarity determining regions (CDRs). CDR1 is flanked by ˜, CDR2 is flanked by ˜˜, and CDR3 is flanked by ˜˜˜.

[0045] FIG. 14A-14B illustrates the amino acid sequences of several human immunoglobulin variable domains that have binding specificity for mouse TNFR1. The presented amino acid sequences are continuous with no gaps; the symbol ˜ has been inserted into some of the sequences to indicate the locations of the complementarity determining regions (CDRs). CDR1 is flanked by ˜, CDR2 is flanked by ˜˜, and CDR3 is flanked by ˜˜˜.

### DETAILED DESCRIPTION OF THE INVENTION

[0046] Within this specification the invention has been described, with reference to embodiments, in a way which enables a clear and concise specification to be written. It is intended and should be appreciated that embodiments may be variously combined or separated without parting from the invention.

[0047] As used herein, the term “ligand” refers to a polypeptide that comprises a domain that has binding specificity for a desired target. Preferably the binding domain is an immunoglobulin single variable domain (e.g., V_{H}, V_{L}, V_{HH}) that has binding specificity for a desired target antigen (e.g., a receptor protein). The binding domain can also comprises one or more complementarity determining regions (CDRs) of an immunoglobulin single variable domain that has binding specificity for a desired target antigen in a suitable format, such that the binding domain has binding specificity for the target antigen. For example, the CDRs can be grafted onto a suitable protein scaffold or skeleton, such as an affibody, an SpA scaffold, an LDL receptor class A domain or an EGF domain. Further, the ligand can be monovalent (e.g., a dAb monomer), bivalent (homobivalent, heterobivalent) or multivalent (homomultivalent, heteromultivalent) as described herein. Thus, “ligands” include polypeptides that consist of a dAb, include polypeptides that consist essentially of such a dAb, polypeptides that comprise a dAb (or the CDRs of a dAb) in a suitable format, such as an antibody format (e.g., IgG-like format, scFv, Fab, Fab′, F(ab′)₂) or a suitable protein scaffold or skeleton, such as an affibody, an SpA scaffold, an LDL receptor class A domain or an EGF domain, dual specific ligands that comprise a dAb that binds a first target protein, antigen or epitope (e.g., IL-1R1 or TNFR1) and a second dAb that binds another target protein, antigen or epitope (e.g., serum albumin), and multispecific ligands as described herein. The binding domain can also be a protein domain comprising a binding site for a desired target, e.g., a protein domain is selected from an affibody, an SpA domain, an LDL receptor class A domain an EGF domain, and an avimer (see, e.g., U.S. Patent Application Publication Nos. 2005/0053973, 2005/0089932, 2005/0164301).

[0048] The phrase “immunoglobulin single variable domain” refers to an antibody variable region (V_{H}, V_{HH}, V_{L}) that specifically binds an antigen or epitope independently of other V regions or domains; however, as the term is used herein, an immunoglobulin single variable domain can be present in a format (e.g., homo- or hetero-multimer) with other variable regions or variable domains where the other regions or domains are not required for antigen binding by the single immunoglobulin variable domain (i.e., where the immunoglobulin single variable domain binds antigen independently of the additional variable domains). “Immunoglobulin single variable domain” encompasses not only an isolated antibody single variable domain polypeptide, but also larger polypeptides that comprise one or more monomers of an antibody single variable domain polypeptide sequence. A “domain antibody” or “dAb” is the same as an “immunoglobulin single variable domain” polypeptide as the term is used herein. An immunoglobulin single variable domain polypeptide, as used herein refers to a mammalian immunoglobulin single variable domain polypeptide, preferably human, but also includes rodent (for example, as disclosed in WO 00/29004, the contents of which are incorporated herein by reference in their entirety) or camelid V_{HH} dAbs. Camelid dAbs are immunoglobulin single variable domain polypeptides which are derived from species including camel, llama, alpaca, dromedary, and guanaco, and comprise heavy chain antibodies naturally devoid of light chain: V_{HH}. V_{HH} molecules are about ten times smaller than IgG molecules, and as single polypeptides, they are very stable, resisting extreme pH and temperature conditions.

[0049] As used herein, the term “dose” refers to the quantity of agent (e.g., anti-IL-1R1 dAb, antagonist of TNFR1) administered to a subject all at one time (unit dose), or in two or more administrations over a defined time interval. For example, dose can refer to the quantity of agent (e.g., anti-IL-1R1 dAb, antagonist of TNFR1) administered to a subject over the course of one day (24 hours) (daily dose), two days, one week, two weeks, three weeks or one or more months (e.g., by a single administration, or by two or more administrations). The interval between doses can be any desired amount of time.

[0050] Two immunoglobulin domains are “complementary” when they belong to families of structures which form cognate pairs or groups or are derived from such families and retain this feature. For example, a V_{H} domain and a V_{L} domain of an antibody are complementary; two V_{H} domains are not complementary, and two V_{L} domains are not complementary. Complementary domains may be found in other members of the immunoglobulin superfamily, such as the V_{α} and V_{β} (or γ and δ) domains of the T-cell receptor. Domains which are artificial, such as domains based on protein scaffolds which do not bind epitopes unless engineered to do so, are non-complementary. Likewise, two domains based on (for example) an immunoglobulin domain and a fibronectin domain are not complementary.

[0051] “Immunoglobulin” refers to a family of polypeptides which retain the immunoglobulin fold characteristic of antibody molecules, which contains two P sheets and, usually, a conserved disulphide bond. Members of the immunoglobulin superfamily are involved in many aspects of cellular and non-cellular interactions in vivo, including widespread roles in the immune system (for example, antibodies, T-cell receptor molecules and the like), involvement in cell adhesion (for example the ICAM molecules) and intracellular signalling (for example, receptor molecules, such as the PDGF receptor). The present invention is applicable to all immunoglobulin superfamily molecules which possess binding domains. Preferably, the present invention relates to antibodies.

[0052] A “domain” is a folded protein structure which retains its tertiary structure independent of the rest of the protein. Generally, domains are responsible for discrete functional properties of proteins, and in many cases may be added, removed or transferred to other proteins without loss of function of the remainder of the protein and/or of the domain. A “single antibody variable domain” is a folded polypeptide domain comprising sequences characteristic of antibody variable domains. It therefore includes complete antibody variable domains and modified variable domains, for example, in which one or more loops have been replaced by sequences which are not characteristic of antibody variable domains, or antibody variable domains which have been truncated or comprise N- or C-terminal extensions, as well as folded fragments of variable domains which retain at least in part the binding activity and specificity of the full-length domain.

[0053] The term “repertoire” refers to a collection of diverse variants, for example polypeptide variants, which differ in their primary sequence. A library used in the present invention will encompass a repertoire of polypeptides comprising at least 1000 members.

[0054] The term “library” refers to a mixture of heterogeneous polypeptides or nucleic acids. The library is composed of members, each of which has a single polypeptide or nucleic acid sequence. To this extent, “library” is synonymous with “repertoire.” Sequence differences between library members are responsible for the diversity present in the library. The library may take the form of a simple mixture of polypeptides or nucleic acids, or may be in the form of organisms or cells, for example bacteria, viruses, animal or plant cells and the like, transformed with a library of nucleic acids. Preferably, each individual organism or cell contains only one or a limited number of library members. Advantageously, the nucleic acids are incorporated into expression vectors, in order to allow expression of the polypeptides encoded by the nucleic acids. In a preferred aspect, therefore, a library may take the form of a population of host organisms, each organism containing one or more copies of an expression vector containing a single member of the library in nucleic acid form which can be expressed to produce its corresponding polypeptide member. Thus, the population of host organisms has the potential to encode a large repertoire of genetically diverse polypeptide variants.

[0055] An “antibody” (for example IgG, IgM, IgA, IgD or IgE) or fragment (such as a Fab, F(ab′)₂, Fv, disulphide linked Fv, scfv, closed conformation multispecific antibody, disulphide-linked scFv, diabody) whether derived from any species naturally producing an antibody, or created by recombinant DNA technology; whether isolated from serum, B-cells, hybridomas, transfectomas, yeast or bacteria).

[0056] A “dual-specific ligand” is a ligand comprising a first immunoglobulin single variable domain and a second immunoglobulin single variable domain as herein defined, wherein the variable regions are capable of binding to two different antigens or two epitopes on the same antigen which are not normally bound by a monospecific immunoglobulin. For example, the two epitopes may be on the same hapten, but are not the same epitope or sufficiently adjacent to be bound by a monospecific ligand. The dual specific ligands according to the invention are composed of variable domains which have different specificities, and do not contain mutually complementary variable domain pairs which have the same specificity. Dual-specific ligands and suitable methods for preparing dual-specific ligands are disclosed in WO 2004/058821, WO 2004/003019, and WO 03/002609, the entire teachings of each of these published international applications are incorporated herein by reference.

[0057] An “antigen” is a molecule that is bound by a ligand according to the present invention. Typically, antigens are bound by antibody ligands and are capable of raising an antibody response in vivo. It may be a polypeptide, protein, nucleic acid or other molecule. Generally, the dual specific ligands according to the invention are selected for target specificity against a particular antigen. In the case of conventional antibodies and fragments thereof, the antibody binding site defined by the variable loops (L1, L2, L3 and H1, H2, H3) is capable of binding to the antigen.

[0058] An “epitope” is a unit of structure conventionally bound by an immunoglobulin V_{H}/V_{L} pair. Epitopes define the minimum binding site for an antibody, and thus represent the target of specificity of an antibody. In the case of a single domain antibody, an epitope represents the unit of structure bound by a variable domain in isolation.

[0059] A “universal framework” is a single antibody framework sequence corresponding to the regions of an antibody conserved in sequence as defined by Kabat (“Sequences of Proteins of Immunological Interest”, US Department of Health and Human Services) or corresponding to the human germline immunoglobulin repertoire or structure as defined by Chothia and Lesk, (1987) J. Mol. Biol. 196:910-917. The invention provides for the use of a single framework, or a set of such frameworks, which has been found to permit the derivation of virtually any binding specificity though variation in the hypervariable regions alone.

[0060] “Half-life” is the time taken for the serum concentration of the ligand to reduce by 50%, in vivo, for example due to degradation of the ligand and/or clearance or sequestration of the ligand by natural mechanisms. The ligands of the invention are stabilized in vivo and their half-life increased by binding to molecules which resist degradation and/or clearance or sequestration. Typically, such molecules are naturally occurring proteins which themselves have a long half-life in vivo. The half-life of a ligand is increased if its functional activity persists, in vivo, for a longer period than a similar ligand which is not specific for the half-life increasing molecule. Thus, a ligand specific for HSA and a target molecule is compared with the same ligand wherein the specificity for HSA is not present, that it does not bind HSA but binds another molecule. For example, it may bind a second epitope on the target molecule. Typically, the half life is increased by 10%, 20%, 30%, 40%, 50% or more. Increases in the range of 2×, 3×, 4×, 5×, 10×, 20×, 30×, 40×, 50× or more of the half life are possible. Alternatively, or in addition, increases in the range of up to 30×, 40×, 50×, 60×, 70×, 80×, 90×, 100×, 150× of the half life are possible.

[0061] As referred to herein, the term “competes” means that the binding of a first epitope to its cognate epitope binding domain is inhibited when a second epitope is bound to its cognate epitope binding domain. For example, binding may be inhibited sterically, for example by physical blocking of a binding domain or by alteration of the structure or environment of a binding domain such that its affinity or avidity for an epitope is reduced.

[0062] Amino acid and nucleotide sequence alignments and homology, similarity or identity, as defined herein are preferably prepared and determined using the algorithm BLAST 2 Sequences, using default parameters (Tatusova, T. A. et al., FEMS Microbiol Lett, 174:187-188 (1999)). Alternatively, the BLAST algorithm (version 2.0) is employed for sequence alignment, with parameters set to default values. BLAST (Basic Local Alignment Search Tool) is the heuristic search algorithm employed by the programs blastp, blastn, blastx, tblastn, and tblastx; these programs ascribe significance to their findings using the statistical methods of Karlin and Altschul, 1990, Proc. Natl. Acad. Sci. USA 87(6):2264-8

[0063] The invention relates to dAb monomers that bind IL-1R1 and inhibit binding of IL-1 (e.g., IL-1α and/or IL-1β) and IL-1ra to IL-1R1, and to ligands comprising such dAb monomers. Such ligands and dAb monomers are useful as therapeutic agents for treating inflammation, disease or other conditions mediated in whole or in part by biological functions induced by binding of IL-1 to IL-1R1 (e.g., local or systemic inflammation, elaboration of inflammatory mediators (e.g., IL-6, Il-8, TNF), fever, activation of immune cells (e.g., lymphocytes, neutrophils), anorexia, hypotension, leucopenia, thrombocytopenia.) The ligands or dAb monomers of the invention can bind IL-1R1 and inhibit IL-1R1 function, thereby providing therapeutic benefit.

[0064] In addition, ligands or dAb monomers of the invention can be used to detect measure or quantify IL-1R1, for example in a biological sample, for diagnostic or other purposes.

Ligands and dAb Monomers that Bind IL-1R1

[0065] The invention provides ligands that comprise a dAb (e.g., dual specific ligand comprising such a dAb, dAb monomer) that binds to IL-1R1 with a K_{d} of 300 nM to 5 pM (ie, 3×10⁻⁷ to 5×10⁻¹²M), preferably 50 nM to 20 pM, more preferably 5 nM to 200 pM and most preferably 1 nM to 100 pM, for example 1×10⁻⁷ M or less, preferably 1×10⁻⁸ M or less, more preferably 1×10⁻⁹ M or less, advantageously 1×10⁻¹⁰ M or less and most preferably 1×10⁻¹¹ M or less; and/or a K_{off} rate constant of 5×10⁻¹ s⁻¹ to 1×10⁻⁷ s⁻¹, preferably 1×10⁻² s⁻¹ to 1×10⁻⁶ s⁻¹, more preferably 5×10⁻³ s⁻¹ to 1×10⁻⁵ s⁻¹, for example 5×10⁻¹ s⁻¹ or less, preferably 1×10⁻² s⁻¹ or less, advantageously 1×10⁻³ s⁻¹ or less, more preferably 1×10⁻⁴ s⁻¹ or less, still more preferably 1×10⁻⁵ s⁻¹ or less, and most preferably 1×10⁻⁶ s⁻¹ or less as determined by surface plasmon resonance.

[0066] Preferably, the ligand or dAb monomer inhibits binding of IL-1 (e.g., IL-1α and/or IL-1β) to IL-1R1, for example in a receptor binding assay, with an inhibitory concentration 50 (IC50) that is equal to or less than about 1 μM, for example an IC50 of about 500 nM to about 50 pM, preferably about 100 nM to about 50 pM, more preferably about 10 nM to about 100 pM, advantageously about 1 nM to about 100 pM; for example about 50 nM or less, preferably about 5 nM or less, more preferably about 500 pM or less, advantageously about 200 pM or less, and most preferably about 100 pM or less.

[0067] Preferably, the ligand or dAb binds human IL-1R1 and inhibits binding of human IL-1 (e.g., IL-1α and/or IL-1β) to human IL-1R1 and inhibits signaling through human IL-1R1 in response to IL-1 binding.

[0068] Preferably, the ligand or dAb monomer neutralizes (inhibits the activity of) IL-1 or IL-1R1 in a standard assay (e.g., IL-1-induced release of Interleukin-8 by MRC-5 cells, IL-1-induced release of Interleukin-6 by whole blood cells) with a neutralizing dose 50 (ND50) that is less than or equal to about 1 μM, for example an ND50 of about 500 nM to about 50 pM, preferably about 100 nM to about 50 pM, more preferably about 10 nM to about 100 pM, advantageously about 1 nM to about 100 pM; for example about 50 nM or less, preferably about 5 nM or less, more preferably about 500 pM or less, advantageously about 200 pM or less, and most preferably about 100 pM or less. For example, the ligand or dAb monomer can inhibit IL-1-induced (e.g., IL-1α- or IL-1β-induced) release of Interleukin-8 by MRC-5 cells (ATCC Accession No. CCL-171) in an in vitro assay with a ND50 that is ≦10 μM, 1 μM, ≦100 nM, ≦10 nM, ≦1 nM, ≦500 pM, ≦300 pM, ≦100 pM, or ≦10 pM. In another example, the ligand or dAb monomer can inhibit IL-1-induced (e.g., IL-1α- or IL-1β-induced) release of Interleukin-6 in an in vitro whole blood assay with a ND50 that is ≦10 μM, ≦1 μM, ≦100 nM, ≦10 nM, ≦1 nM, ≦500 pM, ≦300 pM, ≦100 pM, or ≦10 pM.

[0069] The ligand can be monovalent (e.g., a dAb monomer) or multivalent (e.g., dual specific, multi-specific) as described herein. In particular embodiments, the ligand is a dAb monomer that binds human IL-1R1 and comprises a half-life extending moiety (as described herein) such as a polyethylene glycol moiety.

[0070] In other embodiments, the ligand is multivalent and comprises two or more dAb monomers that bind IL-1R1. Multivalent ligands can contain two or more copies of a particular dAb that binds IL-1R1 or contain two or more dAbs that bind IL-1R1. For example, as described herein, the ligand can be a dimer, trimer or multimer comprising two or more copies of a particular dAb that binds IL-1R1, or can comprise two or more different dAbs that bind IL-1R1. In some examples, the ligand is a homo dimer or homo trimer that comprises two or three copies of a particular dAb that binds IL-1R1, respectively. Preferably, a multivalent ligand does not substantially agonize IL-1R1 (act as an agonist of IL-1R1) in a standard cell assay (i.e., when present at a concentration of 1 nM, 10 nM, 100 nM, 1 μM, 10 μM, 100 μM, 1000 μM or 5,000 μM, results in no more than about 5% of the IL-1R1-mediated activity induced by IL-1 (100 pg/ml) in the assay).

[0071] In certain embodiments, the multivalent ligand contains two or more dAbs that bind a desired epitope or domain of IL-1R1. For example, the multivalent ligand can comprise two or more copies of a dAb that competes with IL-1ra for binding to IL-1R1. In another example, the multivalent ligand can comprise two or more copies of a dAb that does not compete with IL-1ra for binding to IL-1R1.

[0072] In other embodiments, the multivalent ligand contains two or more dabs that bind to different epitopes or domains of IL-1R1. In one example, the multivalent ligand comprises a first dAb that binds a first epitope of IL-1R1, and a second dAb that binds a second different epitope of IL-1R1. Ligands of this type can bind IL-1R1 with high aviditiy, and be more selective for binding to cells that overexpress IL-1R1 or express IL-1R1 on their surface at high density than other ligand formats, such as dAb monomers.

[0073] In certain embodiments, the ligands or dAb monomers of the invention are efficacious in a model disease (e.g., inflammatory disease) when an effective amount is administered. Generally an effective amount in a model of inflammatory disease is about 1 mg/kg to about 10 mg/kg (e.g., about 1 mg/kg, about 2 mg/kg, about 3 mg/kg, about 4 mg/kg, about 5 mg/kg, about 6 mg/kg, about 7 mg/kg, about 8 mg/kg, about 9 mg/kg, or about 10 mg/kg). The models of chronic inflammatory disease described herein are recognized by those skilled in the art as being predictive of therapeutic efficacy in humans. The prior art does not suggest using ligands or dAb monomers, as described herein, in these models, or that they would be efficacious.

[0074] Several suitable animal models of respiratory disease are known in the art, and are recognized by those skilled in the art as being predictive of therapeutic efficacy in humans. For example, suitable animal models of respiratory disease include models of chronic obstructive pulmonary disease (see, Groneberg, D A et al., Respiratory Research 5:18 (2004)), and models of asthma (see, Coffman et al., J. Exp. Med. 201(12):1875-1879 (2001). For example, the ligand or dAb monomer can be efficacious in the mouse model of tobacco smoke-induced chronic obstructive pulmonary disease (COPD) (See, e.g., Wright J L and Churg A., Chest 122:301 S-306S (2002)). For example, administering an effective amount of the ligand or dAb monomer can reduce or delay onset of the symptoms of COPD, as compared to a suitable control.

[0075] In particular embodiments, the ligand or dAb monomer is efficacious in a standard model of arthritis (e.g., inflammatory arthritis, osteoarthritis). Several suitable models are known in the art, for example, mouse collagen-induced arthritis model (see, e.g., Juarranz, et al., Arthritis Research and Therapy, 7:R1034-R1045 (2005)), rat adjuvant induced arthritis (see, e.g., Halloran, M. et al., J. Immunol., 65:7492 (1999), Halloran, M. et al., Arthritis Rheum., 39:810 (1996)), rabbit experimental osteoarthritis (see, e.g., Spriet, et al. Osteoarthritis and Cartilage, 13:171-179 (2005), and several mouse models of osteoarthritis (see, e.g., Helminen, et al., Rheumatology, 41:848-856 (2002)).

[0076] For example, arthritis can be induced in DBA/1 mice by injecting animals with an emulsion of Arthrogen-CIA adjuvant and Arthrogen-CIA collagen (MD-biosciences). About 21 days after the injection, and ligand or dAb monomer to be tested can be administered (e.g., by intraperitoneal injection). Clinical arthritic scores on a scale of 0 to 4 can be measured for each of the 4 limbs of the animals assigning 0 for a normal limb and assigning 4 for a maximally inflamed limb with involvement of multiple joints. Administering an effective amount of ligand or dAb monomer can reduce the average arthritic score of the summation of the four limbs in this mouse collagen-induced arthritis model, for example, the average arthritic score of the summation of the four limbs can be reduced by about 1 to about 16, about 3 to about 16, about 6 to about 16, about 9 to about 16, or about 12 to about 16, as compared to a suitable control, or can delay the onset of symptoms of arthritis, for example, by about 1 day, about 2 days, about 3 days, about 4 days, about 5 days, about 6 days, about 7 days, about 10 days, about 14 days, about 21 days or about 28 days, as compared to a suitable control. In another example, administering an effective amount of the ligand can result in an average arthritic score of the summation of the four limbs in the standard mouse collagen-induced arthritis model of 0 to about 3, about 3 to about 5, about 5 to about 7, about 7 to about 15, about 9 to about 15, about 10 to about 15, about 12 to about 15, or about 14 to about 15.

[0077] In other embodiments, the ligand or dAb monomer is efficacious in the mouse ΔARE model of arthritis (Kontoyiannis et al., J Exp Med 196:1563-74 (2002)). For example, administering an effective amount of the ligand can reduce the average arthritic score in the mouse ΔARE model of arthritis, for example, by about 0.1 to about 2.5, about 0.5 to about 2.5, about 1 to about 2.5, about 1.5 to about 2.5, or about 2 to about 2.5, as compared to a suitable control. In another example, administering an effective amount of the ligand can delay the onset of symptoms of arthritis in the mouse ΔARE model of arthritis by, for example, about 1 day, about 2 days, about 3 days, about 4 days, about 5 days, about 6 days, about 7 days, about 10 days, about 14 days, about 21 days or about 28 days, as compared to a suitable control. In another example, administering an effective amount of the ligand can result in an average arthritic score in the mouse ΔARE model of arthritis of 0 to about 0.5, about 0.5 to about 1, about 1 to about 1.5, about 1.5 to about 2, or about 2 to about 2.5.

[0078] In other embodiments, the ligand or dAb monomer is efficacious in the mouse ΔARE model of inflammatory bowel disease (IBD) (Kontoyiannis et al., J Exp Med 196:1563-74 (2002)). For example, administering an effective amount of the ligand can reduce the average acute and/or chronic inflammation score in the mouse ΔARE model of IBD, for example, by about 0.1 to about 2.5, about 0.5 to about 2.5, about 1 to about 2.5, about 1.5 to about 2.5, or about 2 to about 2.5, as compared to a suitable control. In another example, administering an effective amount of the ligand can delay the onset of symptoms of IBD in the mouse ΔARE model of IBD by, for example, about 1 day, about 2 days, about 3 days, about 4 days, about 5 days, about 6 days, about 7 days, about 10 days, about 14 days, about 21 days or about 28 days, as compared to a suitable control. In another example, administering an effective amount of the ligand can result in an average acute and/or chronic inflammation score in the mouse ΔARE model of IBD of 0 to about 0.5, about 0.5 to about 1, about 1 to about 1.5, about 1.5 to about 2, or about 2 to about 2.5.

[0079] In other embodiments, the ligand or dAb monomer is efficacious in the mouse dextran sulfate sodium (DSS) induced model of IBD (see, Okayasu I. et al., Gastroenterology 98:694-702 (1990); Podolsky K., J Gasteroenterol. 38 suppl XV: 63-66 (2003)). For example, administering an effective amount of the ligand can reduce the average severity score in the mouse DSS model of IBD, for example, by about 0.1 to about 2.5, about 0.5 to about 2.5, about 1 to about 2.5, about 1.5 to about 2.5, or about 2 to about 2.5, as compared to a suitable control. In another example, administering an effective amount of the ligand can delay the onset of symptoms of IBD in the mouse DSS model of IBD by, for example, about 1 day, about 2 days, about 3 days, about 4 days, about 5 days, about 6 days, about 7 days, about 10 days, about 14 days, about 21 days or about 28 days, as compared to a suitable control. In another example, administering an effective amount of the ligand can result in an average severity score in the mouse DSS model of IBD of 0 to about 0.5, about 0.5 to about 1, about 1 to about 1.5, about 1.5 to about 2, or about 2 to about 2.5.

[0080] In some embodiments, the ligand comprises a dAb that specifically binds IL-1R1, inhibits binding of IL-1 (e.g., IL-1α and/or IL-1β) and IL-1ra to IL-1R1, and competes for binding to IL-1R1a with dAb selected from the group consisting of DOM4-130-30 (SEQ ID NO:3), DOM4-130-46 (SEQ ID NO:4), DOM4-130-51 (SEQ ID NO:5), DOM4-130-53 (SEQ ID NO:6), DOM4-130-54 (SEQ ID NO:7), DOM4-130 (SEQ ID NO:215), DOM4-130-1 (SEQ ID NO:216), DOM4-130-2 (SEQ ID NO:217), DOM4-130-3 (SEQ ID NO:218), DOM4-130-4 (SEQ ID NO:219), DOM4-130-5 (SEQ ID NO:220), DOM4-130-6 (SEQ ID NO:221), DOM4-130-7 (SEQ ID NO:222), DOM4-130-8 (SEQ ID NO:223), DOM4-130-9 (SEQ ID NO:224), DOM4-130-10 (SEQ ID NO:225), DOM4-130-11 (SEQ ID NO:226), DOM4-130-12 (SEQ ID NO:227), DOM4-130-13 (SEQ ID NO:228); DOM4-130-14 (SEQ ID NO:229), DOM4-130-15 (SEQ ID NO:230), DOM4-130-16 (SEQ ID NO:231), DOM4-130-17 (SEQ ID NO:232), DOM4-130-18 (SEQ ID NO:233), DOM4-130-19 (SEQ ID NO:234), DOM4-130-20 (SEQ ID NO:235), DOM4-130-21 (SEQ ID NO:236), DOM4-130-22 (SEQ ID NO:237), DOM4-130-23 (SEQ ID NO:238), DOM4-130-24 (SEQ ID NO:239), DOM4-130-25 (SEQ ID NO:240), DOM4-130-26 (SEQ ID NO:241), DOM4-130-27 (SEQ ID NO:242), DOM4-130-28 (SEQ ID NO:243), DOM4-130-31 (SEQ ID NO:244), DOM4-130-32 (SEQ ID NO:245), DOM4-130-33 (SEQ ID NO:246), DOM4-130-34 (SEQ ID NO:247), DOM4-130-35 (SEQ ID NO:248), DOM4-130-36 (SEQ ID NO:249), DOM4-130-37 (SEQ ID NO:250), DOM4-130-38 (SEQ ID NO:251), DOM4-130-39 (SEQ ID NO:252), DOM4-130-40 (SEQ ID NO:253), DOM4-130-41 (SEQ ID NO:254), DOM4-130-42 (SEQ ID NO:255), DOM4-130-43 (SEQ ID NO:256), DOM4-130-44 (SEQ ID NO:257), DOM4-130-45 (SEQ ID NO:258), DOM4-130-46 (SEQ ID NO:259), DOM4-130-47 (SEQ ID NO:260), DOM4-130-48 (SEQ ID NO:261), DOM4-130-49 (SEQ ID NO:262), DOM4-130-50 (SEQ ID NO:263), DOM4-130-51 (SEQ ID NO:264), DOM4-130-52 (SEQ ID NO:265), DOM4-130-53 (SEQ ID NO:266), DOM4-130-54 (SEQ ID NO:267), DOM4-130-55 (SEQ ID NO:268), DOM4-130-56 (SEQ ID NO:269), DOM4-130-57 (SEQ ID NO:270), DOM4-130-58 (SEQ ID NO:271), DOM4-130-59 (SEQ ID NO:272), DOM4-130-60 (SEQ ID NO:273), DOM4-130-61 (SEQ ID NO:274), DOM4-130-62 (SEQ ID NO:275), DOM4-130-63 (SEQ ID NO:276), DOM4-130-64 (SEQ ID NO:277), DOM4-130-65 (SEQ ID NO:278), DOM4-130-66 (SEQ ID NO:279), DOM4-130-67 (SEQ ID NO:280), DOM4-130-68 (SEQ ID NO:281), DOM4-130-69 (SEQ ID NO:282), DOM4-130-70 (SEQ ID NO:283), DOM4-130-71 (SEQ ID NO:284), DOM4-130-72 (SEQ ID NO:285), DOM4-130-73 (SEQ ID NO:286), DOM4-130-74 (SEQ ID NO:287), DOM4-130-75 (SEQ ID NO:288), DOM4-130-76 (SEQ ID NO:289), DOM4-130-77 (SEQ ID NO:290), DOM4-130-78 (SEQ ID NO:291), DOM4-130-79 (SEQ ID NO:292), DOM4-130-80 (SEQ ID NO:293), DOM4-130-81 (SEQ ID NO:294), DOM4-130-82 (SEQ ID NO:295), DOM4-130-83 (SEQ ID NO:296), DOM4-130-84 (SEQ ID NO:297), DOM4-130-85 (SEQ ID NO:298), DOM4-130-86 (SEQ ID NO:299), DOM4-130-87 (SEQ ID NO:300), DOM4-130-88 (SEQ ID NO:301), DOM4-130-89 (SEQ ID NO:302), DOM4-130-90 (SEQ ID NO:303), DOM4-130-91 (SEQ ID NO:304), DOM4-130-92 (SEQ ID NO:305), DOM4-130-93 (SEQ ID NO:306), DOM4-130-94 (SEQ ID NO:307), DOM4-130-95 (SEQ ID NO:308), DOM4-130-96 (SEQ ID NO:309), DOM4-130-97 (SEQ ID NO:310), DOM4-130-98 (SEQ ID NO:311), DOM4-130-99 (SEQ ID NO:312), DOM4-130-100 (SEQ ID NO:313), DOM4-130-101 (SEQ ID NO:314), DOM4-130-102 (SEQ ID NO:315), DOM4-130-103 (SEQ ID NO:316), DOM4-130-104 (SEQ ID NO:317), DOM4-130-105 (SEQ ID NO:318), DOM4-130-106 (SEQ ID NO:319), DOM4-130-107 (SEQ ID NO:320), DOM4-130-108 (SEQ ID NO:321), DOM4-130-109 (SEQ ID NO:322), DOM4-130-110 (SEQ ID NO:323), DOM4-130-111 (SEQ ID NO:324), DOM4-130-112 (SEQ ID NO:325), DOM4-130-113 (SEQ ID NO:326), DOM4-130-114 (SEQ ID NO:327), DOM4-130-115 (SEQ ID NO:328), DOM4-130-116 (SEQ ID NO:329), DOM4-130-117 (SEQ ID NO:330), DOM4-130-118 (SEQ ID NO:331), DOM4-130-119 (SEQ ID NO:332), DOM4-130-120 (SEQ ID NO:333), DOM4-130-121 (SEQ ID NO:334), DOM4-130-122 (SEQ ID NO:335), DOM4-130-123 (SEQ ID NO:336), DOM4-130-124 (SEQ ID NO:337), DOM4-130-125 (SEQ ID NO:338), DOM4-130-126 (SEQ ID NO:339), DOM4-130-127 (SEQ ID NO:340), DOM4-130-128 (SEQ ID NO:341), DOM4-130-129 (SEQ ID NO:342), DOM4-130-130 (SEQ ID NO:343), DOM4-130-131 (SEQ ID NO:344), DOM4-130-132 (SEQ ID NO:345), and DOM4-130-133 (SEQ ID NO:346).

[0081] In some embodiments, the ligand comprises a dAb that specifically binds IL-1R, inhibits binding of IL-1 (e.g., IL-1α and/or IL-1β) and IL-1ra to IL-1R1, and comprises an amino acid sequence that has at least about 80%, at least about 85%, at least about 90%, at least about 91%, at least about 92%, at least about 93%, at least about 94%, at least about 95%, at least about 96%, at least about 97%, at least about 98%, or at least about 99% amino acid sequence identity with the amino acid sequence or a dAb selected from the group consisting of DOM4-130-30 (SEQ ID NO:3), DOM4-130-46 (SEQ ID NO:4), DOM4-130-51 (SEQ ID NO:5), DOM4-130-53 (SEQ ID NO:6), DOM4-130-54 (SEQ ID NO:7), DOM4-130 (SEQ ID NO:215), DOM4-130-1 (SEQ ID NO:216), DOM4-130-2 (SEQ ID NO:217), DOM4-130-3 (SEQ ID NO:218), DOM4-130-4 (SEQ ID NO:219), DOM4-130-5 (SEQ ID NO:220), DOM4-130-6 (SEQ ID NO:221), DOM4-130-7 (SEQ ID NO:222), DOM4-130-8 (SEQ ID NO:223), DOM4-130-9 (SEQ ID NO:224), DOM4-130-10 (SEQ ID NO:225), DOM4-130-11 (SEQ ID NO:226), DOM4-130-12 (SEQ ID NO:227), DOM4-130-13 (SEQ ID NO:228), DOM4-130-14 (SEQ ID NO:229), DOM4-130-15 (SEQ ID NO:230), DOM4-130-16 (SEQ ID NO:231), DOM4-130-17 (SEQ ID NO:232), DOM4-130-18 (SEQ ID NO:233), DOM4-130-19 (SEQ ID NO:234), DOM4-130-20 (SEQ ID NO:235), DOM4-130-21 (SEQ ID NO:236), DOM4-130-22 (SEQ ID NO:237), DOM4-130-23 (SEQ ID NO:238), DOM4-130-24 (SEQ ID NO:239), DOM4-130-25 (SEQ ID NO:240), DOM4-130-26 (SEQ ID NO:241), DOM4-130-27 (SEQ ID NO:242), DOM4-130-28 (SEQ ID NO:243), DOM4-130-31 (SEQ ID NO:244), DOM4-130-32 (SEQ ID NO:245), DOM4-130-33 (SEQ ID NO:246), DOM4-130-34 (SEQ ID NO:247), DOM4-130-35 (SEQ ID NO:248), DOM4-130-36 (SEQ ID NO:249), DOM4-130-37 (SEQ ID NO:250), DOM4-130-38 (SEQ ID NO:251), DOM4-130-39 (SEQ ID NO:252), DOM4-130-40 (SEQ ID NO:253), DOM4-130-41 (SEQ ID NO:254), DOM4-130-42 (SEQ ID NO:255), DOM4-130-43 (SEQ ID NO:256), DOM4-130-44 (SEQ ID NO:257), DOM4-130-45 (SEQ ID NO:258), DOM4-130-46 (SEQ ID NO:259), DOM4-130-47 (SEQ ID NO:260), DOM4-130-48 (SEQ ID NO:261), DOM4-130-49 (SEQ ID NO:262), DOM4-130-50 (SEQ ID NO:263), DOM4-130-51 (SEQ ID NO:264), DOM4-130-52 (SEQ ID NO:265), DOM4-130-53 (SEQ ID NO:266), DOM4-130-54 (SEQ ID NO:267), DOM4-130-55 (SEQ ID NO:268), DOM4-130-56 (SEQ ID NO:269), DOM4-130-57 (SEQ ID NO:270), DOM4-130-58 (SEQ ID NO:271), DOM4-130-59 (SEQ ID NO:272), DOM4-130-60 (SEQ ID NO:273), DOM4-130-61 (SEQ ID NO:274), DOM4-130-62 (SEQ ID NO:275), DOM4-130-63 (SEQ ID NO:276), DOM4-130-64 (SEQ ID NO:277), DOM4-130-65 (SEQ ID NO:278), DOM4-130-66 (SEQ ID NO:279), DOM4-130-67 (SEQ ID NO:280), DOM4-130-68 (SEQ ID NO:281), DOM4-130-69 (SEQ ID NO:282), DOM4-130-70 (SEQ ID NO:283), DOM4-130-71 (SEQ ID NO:284), DOM4-130-72 (SEQ ID NO:285), DOM4-130-73 (SEQ ID NO:286), DOM4-130-74 (SEQ ID NO:287), DOM4-130-75 (SEQ ID NO:288), DOM4-130-76 (SEQ ID NO:289), DOM4-130-77 (SEQ ID NO:290), DOM4-130-78 (SEQ ID NO:291), DOM4-130-79 (SEQ ID NO:292), DOM4-130-80 (SEQ ID NO:293), DOM4-130-81 (SEQ ID NO:294), DOM4-130-82 (SEQ ID NO:295), DOM4-130-83 (SEQ ID NO:296), DOM4-130-84 (SEQ ID NO:297), DOM4-130-85 (SEQ ID NO:298), DOM4-130-86 (SEQ ID NO:299), DOM4-130-87 (SEQ ID NO:300), DOM4-130-88 (SEQ ID NO:301), DOM4-130-89 (SEQ ID NO:302), DOM4-130-90 (SEQ ID NO:303), DOM4-130-91 (SEQ ID NO:304), DOM4-130-92 (SEQ ID NO:305), DOM4-130-93 (SEQ ID NO:306), DOM4-130-94 (SEQ ID NO:307), DOM4-130-95 (SEQ ID NO:308), DOM4-130-96 (SEQ ID NO:309), DOM4-130-97 (SEQ ID NO:310), DOM4-130-98 (SEQ ID NO:311), DOM4-130-99 (SEQ ID NO:312), DOM4-130-100 (SEQ ID NO:313), DOM4-130-101 (SEQ ID NO:314), DOM4-130-102 (SEQ ID NO:315), DOM4-130-103 (SEQ ID NO:316), DOM4-130-104 (SEQ ID NO:317), DOM4-130-105 (SEQ ID NO:318), DOM4-130-106 (SEQ ID NO:319), DOM4-130-107 (SEQ ID NO:320), DOM4-130-108 (SEQ ID NO:321), DOM4-130-109 (SEQ ID NO:322), DOM4-130-110 (SEQ ID NO:323), DOM4-130-111 (SEQ ID NO:324), DOM4-130-112 (SEQ ID NO:325), DOM4-130-113 (SEQ ID NO:326), DOM4-130-114 (SEQ ID NO:327), DOM4-130-115 (SEQ ID NO:328), DOM4-130-116 (SEQ ID NO:329), DOM4-130-117 (SEQ ID NO:330), DOM4-130-118 (SEQ ID NO:331), DOM4-130-119 (SEQ ID NO:332), DOM4-130-120 (SEQ ID NO:333), DOM4-130-121 (SEQ ID NO:334), DOM4-130-122 (SEQ ID NO:335), DOM4-130-123 (SEQ ID NO:336), DOM4-130-124 (SEQ ID NO:337), DOM4-130-125 (SEQ ID NO:338), DOM4-130-126 (SEQ ID NO:339), DOM4-130-127 (SEQ ID NO:340), DOM4-130-128 (SEQ ID NO:341), DOM4-130-129 (SEQ ID NO:342), DOM4-130-130 (SEQ ID NO:343), DOM4-130-131 (SEQ ID NO:344), DOM4-130-132 (SEQ ID NO:345), and DOM4-130-133 (SEQ ID NO:346).

[0082] In some embodiments, the ligand comprises a dAb that binds IL-1R1 and competes with any of the dAbs disclosed herein for binding to IL-1R1 (e.g., human IL-1R1).

[0083] In preferred embodiments, the ligand comprises a dAb monomer selected from the group consisting of DOM4-130-30, DOM4-130-46, DOM4-130-51, DOM4-130-53, and DOM4-130-54. For example, the ligand can be a monomer, or be a hetero- or homo-dimer, trimer or oligomer of any of these dAbs. If desired, the ligand can further comprise a half-life extending moiety, such as a polyethylene glycol moiety. In some embodiment, the ligand comprises a dAb monomer selected from the group consisting of DOM4-130-30, DOM4-130-46, DOM4-130-51, DOM4-130-53, and DOM4-130-54, and a dAb monomer that binds serum albumin. For example, the ligand can be a dual specific ligand that comprises DOM4-130-54 and DOM7h-8.

[0084] The dAb monomer can comprise any suitable immunoglobulin variable domain, and preferably comprises a human variable domain or a variable domain that comprises human framework regions. In certain embodiments, the dAb monomer comprises a universal framework, as described herein.

[0085] The universal framework can be a V_{L} framework (Vλ or Vκ), such as a framework that comprises the framework amino acid sequences encoded by the human germline DPK1, DPK2, DPK3, DPK4, DPK5, DPK6, DPK7, DPK8, DPK9, DPK10, DPK12, DPK13, DPK15, DPK16, DPK18, DPK19, DPK20, DPK21, DPK22, DPK23, DPK24, DPK25, DPK26 or DPK 28 immunoglobulin gene segment. If desired, the V_{L} framework can further comprises the framework amino acid sequence encoded by the human germline J_{κ}1, J_{κ}2, J_{κ}3, J_{κ}4, or J_{κ}5 immunoglobulin gene segment.

[0086] In other embodiments the universal framework can be a V_{H} framework, such as a framework that comprises the framework amino acid sequences encoded by the human germline DP4, DP7, DP8, DP9, DP10, DP31, DP33, DP38, DP45, DP46, DP47, DP49, DP50, DP51, DP53, DP54, DP65, DP66, DP67, DP68 or DP69 immunoglobulin gene segment. If desired, the V_{H} framework can further comprises the framework amino acid sequence encoded by the human germline J_{H}1, J_{H}2, J_{H}3, J_{H}4, J_{H}4b, J_{H}5 and J_{H}6 immunoglobulin gene segment.

[0087] In certain embodiments, the dAb monomer comprises one or more framework regions comprising an amino acid sequence that is the same as the amino acid sequence of a corresponding framework region encoded by a human germline antibody gene segment, or the amino acid sequences of one or more of said framework regions collectively comprise up to 5 amino acid differences relative to the amino acid sequence of said corresponding framework region encoded by a human germline antibody gene segment.

[0088] In other embodiments, the amino acid sequences of FW1, FW2, FW3 and FW4 of the dAb monomer are the same as the amino acid sequences of corresponding framework regions encoded by a human germline antibody gene segment, or the amino acid sequences of FW1, FW2, FW3 and FW4 collectively contain up to 10 amino acid differences relative to the amino acid sequences of corresponding framework regions encoded by said human germline antibody gene segment.

[0089] In other embodiments, the dAb monomer comprises FW1, FW2 and FW3 regions, and the amino acid sequence of said FW1, FW2 and FW3 regions are the same as the amino acid sequences of corresponding framework regions encoded by human germline antibody gene segments.

[0090] In particular embodiments, the dAb monomer ligand comprises the DPK9 V_{L} framework, or a V_{H} framework selected from the group consisting of DP47, DP45 and DP38. The dAb monomer can comprise a binding site for a generic ligand, such as protein A, protein L and protein G.

[0091] In certain embodiments, the ligand or dAb monomer is substantially resistant to aggregation. For example, in some embodiments, less than about 10%, less than about 9%, less than about 8%, less than about 7%, less than about 6%, less than about 5%, less than about 4%, less than about 3%, less than about 2% or less than about 1% of the ligand or dAb monomer aggregates when a 1-5 mg/ml, 5-10 mg/ml, 10-20 mg/ml, 20-50 mg/ml, 50-100 mg/ml, 100-200 mg/ml or 200-500 mg/ml solution of ligand or dAb in a solvent that is routinely used for drug formulation such as saline, buffered saline, citrate buffer saline, water, an emulsion, and any of these solvents with an acceptable excipient such as those approved by the FDA, is maintained at about 22° C., 22-25° C., 25-30° C., 30-37° C., 37-40° C., 40-50° C., 50-60° C., 60-70° C., 70-80° C., 15-20° C., 10-15° C., 5-10° C., 2-5° C., 0-2° C., −10° C. to 0° C., −20° C. to −10° C., −40° C. to −20° C., −60° C. to −40° C., or −80° C. to −60° C., for a period of about time, for example, 10 minutes, 1 hour, 8 hours, 24 hours, 2 days, 3 days, 4 days, 1 week, 2 weeks, 3 weeks, 1 month, 2 months, 3 months, 4 months, 6 months, 1 year, or 2 years.

[0092] Aggregation can be assessed using any suitable method, such as, by microscopy, assessing turbidity of a solution by visual inspection or spectroscopy or any other suitable method. Preferably, aggregation is assessed by dynamic light scattering. Ligands or dAb monomers that are resistant to aggregation provide several advantages. For example, such ligands or dAb monomers can readily be produced in high yield as soluble proteins by expression using a suitable biological production system, such as E. coli, and can be formulated and/or stored at higher concentrations than conventional polypeptides, and with less aggregation and loss of activity.

[0093] In addition, ligands or dAb monomers that are resistant to aggregation can be produced more economically than other antigen- or epitope-binding polypeptides (e.g., conventional antibodies). For example, generally, preparation of antigen- or epitope-binding polypeptides intended for in vivo applications includes processes (e.g., gel filtration) that remove aggregated polypeptides. Failure to remove such aggregates can result in a preparation that is not suitable for in vivo applications because, for example, aggregates of an antigen-binding polypeptide that is intended to act as an antagonist can function as an agonist by inducing cross-linking or clustering of the target antigen. Protein aggregates can also reduce the efficacy of therapeutic polypeptides by inducing an immune response in the subject to which they are administered.

[0094] In contrast, the aggregation resistant ligands or dAb monomers of the invention can be prepared for in vivo applications without the need to include process steps that remove aggregates, and can be used in in vivo applications without the aforementioned disadvantages caused by polypeptide aggregates.

[0095] In some embodiments, the ligand or dAb monomer unfolds reversibly when heated to a temperature (Ts) and cooled to a temperature (Tc), wherein Ts is greater than the melting temperature (Tm) of the dAb, and Tc is lower than the melting temperature of the dAb. For example, the dAb monomer can unfold reversibly when heated to 80° C. and cooled to about room temperature. A polypeptide that unfolds reversibly loses function when unfolded but regains function upon refolding. Such polypeptides are distinguished from polypeptides that aggregate when unfolded or that improperly refold (misfolded polypeptides), i.e., do not regain function.

[0096] Polypeptide unfolding and refolding can be assessed, for example, by directly or indirectly detecting polypeptide structure using any suitable method. For example, polypeptide structure can be detected by circular dichroism (CD) (e.g., far-UV CD, near-UV CD), fluorescence (e.g., fluorescence of tryptophan side chains), susceptibility to proteolysis, nuclear magnetic resonance (NMR), or by detecting or measuring a polypeptide function that is dependent upon proper folding (e.g., binding to target ligand, binding to generic ligand). In one example, polypeptide unfolding is assessed using a functional assay in which loss of binding function (e.g., binding a generic and/or target ligand, binding a substrate) indicates that the polypeptide is unfolded.

[0097] The extent of unfolding and refolding of a ligand or dAb monomer can be determined using an unfolding or denaturation curve. An unfolding curve can be produced by plotting temperature as the ordinate and the relative concentration of folded polypeptide as the abscissa. The relative concentration of folded ligand or dAb monomer can be determined directly or indirectly using any suitable method (e.g., CD, fluorescence, binding assay). For example, a ligand or dAb monomer solution can be prepared and ellipticity of the solution determined by CD. The ellipticity value obtained represents a relative concentration of folded ligand or dAb monomer of 100%. The ligand or dAb monomer in the solution is then unfolded by incrementally raising the temperature of the solution and ellipticity is determined at suitable increments (e.g., after each increase of one degree in temperature). The ligand or dAb monomer in solution is then refolded by incrementally reducing the temperature of the solution and ellipticity is determined at suitable increments. The data can be plotted to produce an unfolding curve and a refolding curve. The unfolding and refolding curves have a characteristic sigmoidal shape that includes a portion in which the ligand or dAb monomer molecules are folded, an unfolding/refolding transition in which ligand or dAb monomer molecules are unfolded to various degrees, and a portion in which the ligand or dAb monomer molecules are unfolded. The y-axis intercept of the refolding curve is the relative amount of refolded ligand or dAb monomer recovered. A recovery of at least about 50%, or at least about 60%, or at least about 70%, or at least about 75%, or at least about 80%, or at least about 85%, or at least about 90%, or at least about 95% is indicative that the ligand or dAb monomer unfolds reversibly.

[0098] In a preferred embodiment, reversibility of unfolding of the ligand or dAb monomer is determined by preparing a ligand or dAb monomer solution and plotting heat unfolding and refolding curves. The ligand or dAb monomer solution can be prepared in any suitable solvent, such as an aqueous buffer that has a pH suitable to allow the ligand or dAb monomer to dissolve (e.g., pH that is about 3 units above or below the isoelectric point (pI)). The ligand or dAb monomer solution is concentrated enough to allow unfolding/folding to be detected. For example, the ligand or dAb monomer solution can be about 0.1 μM to about 100 μM, or preferably about 1 μM to about 10 μM.

[0099] If the melting temperature (Tm) of the ligand or dAb monomer is known, the solution can be heated to about ten degrees below the Tm (Tm−10) and folding assessed by ellipticity or fluorescence (e.g., far-UV CD scan from 200 nm to 250 nm, fixed wavelength CD at 235 nm or 225 nm; tryptophan fluorescent emission spectra at 300 to 450 nm with excitation at 298 nm) to provide 100% relative folded ligand or dAb monomer. The solution is then heated to at least ten degrees above Tm (Tm+10) in predetermined increments (e.g., increases of about 0.1 to about 1 degree), and ellipticity or fluorescence is determined at each increment. Then, the ligand or dAb monomer is refolded by cooling to at least Tm−10 in predetermined increments and ellipticity or fluorescence determined at each increment. If the melting temperature of the ligand or dAb monomer is not known, the solution can be unfolded by incrementally heating from about 25° C. to about 10° C. and then refolded by incrementally cooling to at least about 25° C., and ellipticity or fluorescence at each heating and cooling increment is determined. The data obtained can be plotted to produce an unfolding curve and a refolding curve, in which the y-axis intercept of the refolding curve is the relative amount of refolded protein recovered. In some embodiments, the dAb monomer does not comprise a Camelid immunoglobulin variable domain, or one or more framework amino acids that are unique to immunoglobulin variable domains encoded by Camelid germline antibody gene segments.

[0100] Preferably, the ligand or dAb monomer is secreted in a quantity of at least about 0.5 mg/L when expressed in E. coli or in Pichia species (e.g., P. pastoris). In other preferred embodiments, the dAb monomer is secreted in a quantity of at least about 0.75 mg/L, at least about 1 mg/L, at least about 4 mg/L, at least about 5 mg/L, at least about 10 mg/L, at least about 15 mg/L, at least about 20 mg/L, at least about 25 mg/L, at least about 30 mg/L, at least about 35 mg/L, at least about 40 mg/L, at least about 45 mg/L, or at least about 50 mg/L, or at least about 100 mg/L, or at least about 200 mg/L, or at least about 300 mg/L, or at least about 400 mg/L, or at least about 500 mg/L, or at least about 600 mg/L, or at least about 700 mg/L, or at least about 800 mg/L, at least about 900 mg/L, or at least about 1 g/L when expressed in E. coli or in Pichia species (e.g., P. pastoris). In other preferred embodiments, the dAb monomer is secreted in a quantity of at least about 1 mg/L to at least about 1 g/L, at least about 1 mg/L to at least about 750 mg/t, at least about 100 mg/L to at least about 1 g/L, at least about 200 mg/L to at least about 1 g/L, at least about 300 mg/L to at least about 1 g/L, at least about 400 mg/L to at least about 1 g/L, at least about 500 mg/L to at least about 1 g/L, at least about 600 mg/L to at least about 1 g/L, at least about 700 mg/L to at least about 1 g/L, at least about 800 mg/L to at least about 1 g/L, or at least about 900 mg/L to at least about 1 g/L when expressed in E. coli or in Pichia species (e.g., P. pastoris). Although, the ligands and dAb monomers described herein can be secretable when expressed in E. coli or in Pichia species (e.g., P. pastoris), they can be produced using any suitable method, such as synthetic chemical methods or biological production methods that do not employ E. coli or Pichia species.

dAb Monomers that Bind Serum Albumin

[0101] The ligand of the invention can comprise a dAb monomer that binds serum albumin (SA) with a K_{d} of 1 nM to 500 μM (ie, ×10⁻⁹ to 5×10⁻⁴), preferably 100 nM to 10 μM. Preferably, for a dual specific ligand comprising a first anti-SA dAb and a second dAb to another target, the affinity (eg K_{d} and/or K_{off} as measured by surface plasmon resonance, eg using BiaCore) of the second dAb for its target is from 1 to 100000 times (preferably 100 to 100000, more preferably 1000 to 100000, or 10000 to 100000 times) the affinity of the first dAb for SA. For example, the first dAb binds SA with an affinity of approximately 10 μM, while the second dAb binds its target with an affinity of 100 pM. Preferably, the serum albumin is human serum albumin (HSA). In one embodiment, the first dAb (or a dAb monomer) binds SA (eg, HSA) with a K_{d} of approximately 50, preferably 70, and more preferably 100, 150 or 200 nM.

[0102] In certain embodiments, the dAb monomer that binds SA resists aggregation, unfolds reversibly and/or comprises a framework region as described above for dAb monomers that bind IL-1R1.

[0103] In particular embodiments, the antigen-binding fragment of an antibody that binds serum albumin is a dAb that binds human serum albumin. In certain embodiments, the dAb binds human serum albumin and competes for binding to albumin with a dAb selected from the group consisting of DOM7m-16 (SEQ ID NO:723), DOM7m-12 (SEQ ID NO:724), DOM7m-26 (SEQ ID NO:725), DOM7r-1 (SEQ ID NO:726), DOM7r-3 (SEQ ID NO:727), DOM7r-4 (SEQ ID NO:728), DOM7r-5 (SEQ ID NO:729), DOM7r-7 (SEQ ID NO:730), DOM7r-8 (SEQ ID NO:731), DOM7h-2 (SEQ ID NO:732), DOM7h-3 (SEQ ID NO:733), DOM7h-4 (SEQ ID NO:734), DOM7h-6 (SEQ ID NO:735), DOM7h-1 (SEQ ID NO:736), DOM7h-7 (SEQ ID NO:737), DOM7h-8 (SEQ ID NO:746), DOM7r-13 (SEQ ID NO:747), DOM7r-14 (SEQ ID NO:748), DOM7h-22 (SEQ ID NO:739), DOM7h-23 (SEQ ID NO:740), DOM7h-24 (SEQ ID NO:741), DOM7h-25 (SEQ ID NO:742), DOM7h-26 (SEQ ID NO:743), DOM7h-21 (SEQ ID NO:744), DOM7h-27 (SEQ ID NO:745), DOM7r-15 (SEQ ID NO:749), DOM7r-16 (SEQ ID NO:750), DOM7r-17 (SEQ ID NO:751), DOM7r-18 (SEQ ID NO:752), DOM7r-19 (SEQ ID NO:753), DOM7r-20 (SEQ ID NO:754), DOM7r-21 (SEQ ID NO:755), DOM7r-22 (SEQ ID NO:756), DOM7r-23 (SEQ ID NO:757), DOM7r-24 (SEQ ID NO:758), DOM7r-25 (SEQ ID NO:759), DOM7r-26 (SEQ ID NO:760), DOM7r-27 (SEQ ID NO:761), DOM7r-28 (SEQ ID NO:762), DOM7r-29 (SEQ ID NO:763), DOM7r-30 (SEQ ID NO:764), DOM7r-31 (SEQ ID NO:765), DOM7r-32 (SEQ ID NO:766), and DOM7r-33 (SEQ ID NO:767).

[0104] In certain embodiments, the dAb binds human serum albumin and comprises an amino acid sequence that has at least about 80%, or at least about 85%, or at least about 90%, or at least about 95%, or at least about 96%, or at least about 97%, or at least about 98%, or at least about 99% amino acid sequence identity with the amino acid sequence of a dAb selected from the group consisting of DOM7m-16 (SEQ ID NO:723), DOM7m-12 (SEQ ID NO:724), DOM7m-26 (SEQ ID NO:725), DOM7r-1 (SEQ ID NO:726), DOM7r-3 (SEQ ID NO:727), DOM7r-4 (SEQ ID NO:728), DOM7r-5 (SEQ ID NO:729), DOM7r-7 (SEQ ID NO:730), DOM7r-8 (SEQ ID NO:731), DOM7h-2 (SEQ ID NO:732), DOM7h-3 (SEQ ID NO:733), DOM7h-4 (SEQ ID NO:734), DOM7h-6 (SEQ ID NO:735), DOM7h-1 (SEQ ID NO:736), DOM7h-7 (SEQ ID NO:737), DOM7h-8 (SEQ ID NO:746), DOM7r-13 (SEQ ID NO:747), DOM7r-14 (SEQ ID NO:748), DOM7h-22 (SEQ ID NO:739), DOM7h-23 (SEQ ID NO:740), DOM7h-24 (SEQ ID NO:741), DOM7h-25 (SEQ ID NO:742), DOM7h-26 (SEQ ID NO:743), DOM7h-21 (SEQ ID NO:744), DOM7h-27 (SEQ ID NO:745), DOM7r-15 (SEQ ID NO:749), DOM7r-16 (SEQ ID NO:750), DOM7r-17 (SEQ ID NO:751), DOM7r-18 (SEQ ID NO:752), DOM7r-19 (SEQ ID NO:753), DOM7r-20 (SEQ ID NO:754), DOM7r-21 (SEQ ID NO:755), DOM7r-22 (SEQ ID NO:756), DOM7r-23 (SEQ ID NO:757), DOM7r-24 (SEQ ID NO:758), DOM7r-25 (SEQ ID NO:759), DOM7r-26 (SEQ ID NO:760), DOM7r-27 (SEQ ID NO:761), DOM7r-28 (SEQ ID NO:762), DOM7r-29 (SEQ ID NO:763), DOM7r-30 (SEQ ID NO:764), DOM7r-31 (SEQ ID NO:765), DOM7r-32 (SEQ ID NO:766), and DOM7r-33 (SEQ ID NO:767).

[0105] For example, the dAb that binds human serum albumin can comprise an amino acid sequence that has at least about 90%, or at least about 95%, or at least about 96%, or at least about 97%, or at least about 98%, or at least about 99% amino acid sequence identity with DOM7h-2 (SEQ ID NO:732), DOM7h-3 (SEQ ID NO:733), DOM7h-4 (SEQ ID NO:734), DOM7h-6 (SEQ ID NO:735), DOM7h-1 (SEQ ID NO:736), DOM7h-7 (SEQ ID NO:737), DOM7h-8 (SEQ ID NO:746), DOM7r-13 (SEQ ID NO:747), DOM7r-14 (SEQ ID NO:748), DOM7h-22 (SEQ ID NO:739), DOM7h-23 (SEQ ID NO:740), DOM7h-24 (SEQ ID NO:741), DOM7h-25 (SEQ ID NO:742), DOM7h-26 (SEQ ID NO:743), DOM7h-21 (SEQ ID NO:744), and DOM7h-27 (SEQ ID NO:745).

[0106] Amino acid sequence identity is preferably determined using a suitable sequence alignment algorithm and default parameters, such as BLAST P (Karlin and Altschul, Proc. Natl. Acad. Sci. USA 87(6):2264-2268 (1990)).

[0107] In more particular embodiments, the dAb is a V_{κ} dAb that binds human serum albumin and has a amino acid sequence selected from the group consisting of DOM7h-2 (SEQ ID NO:732), DOM7h-3 (SEQ ID NO:733), DOM7h-4 (SEQ ID NO:734), DOM7h-6 (SEQ ID NO:735), DOM7h-1 (SEQ ID NO:736), DOM7h-7 (SEQ ID NO:737), DOM7h-8 (SEQ ID NO:746), DOM7r-13 (SEQ ID NO:747), and DOM7r-14 (SEQ ID NO:748), or a V_{H} dAb that has an amino acid sequence selected from the group consisting of DOM7h-22 (SEQ ID NO:739), DOM7h-23 (SEQ ID NO:740), DOM7h-24 (SEQ ID NO:741), DOM7h-25 (SEQ ID NO:742), DOM7h-26 (SEQ ID NO:743), DOM7h-21 (SEQ ID NO:744), and DOM7h-27 (SEQ ID NO:745). In other embodiments, the antigen-binding fragment of an antibody that binds serum albumin is a dAb that binds human serum albumin and comprises the CDRs of any of the foregoing amino acid sequences.

[0108] Suitable Camelid V_{HH} that bind serum albumin include those disclosed in WO 2004/041862 (Ablynx N.V.) and herein (SEQ ID NOS:768-784). In certain embodiments, the Camelid V_{HH} binds human serum albumin and comprises an amino acid sequence that has at least about 80%, or at least about 85%, or at least about 90%, or at least about 95%, or at least about 96%, or at least about 97%, or at least about 98%, or at least about 99% amino acid sequence identity with SEQ ID NO:768, SEQ ID NO:769, SEQ ID NO:770, SEQ ID NO:771, SEQ ID NO:772, SEQ ID NO:773, SEQ ID NO:774, SEQ ID NO:775, SEQ ID NO:776, SEQ ID NO:777, SEQ ID NO:778, SEQ ID NO:779, SEQ ID NO:780, SEQ ID NO:781, SEQ ID NO:782, SEQ ID NO:783, or SEQ ID NO:784. Amino acid sequence identity is preferably determined using a suitable sequence alignment algorithm and default parameters, such as BLAST P (Karlin and Altschul, Proc. Natl. Acad. Sci. USA 87(6):2264-2268 (1990)).

[0109] In some embodiments, the ligand comprises an anti-serum albumin dAb that competes with any anti-serum albumin dAb disclosed herein for binding to serum albumin (e.g., human serum albumin).

dAb Monomers that Bind Tumor Necrosis Factor Receptor 1 (TNFR1)

[0110] The ligand of the invention can comprise a dAb monomer that binds TNFR1. TNFR1 is a transmembrane receptor containing an extracellular region that binds ligand and an intracellular domain that lacks intrinsic signal transduction activity but can associate with signal transduction molecules. The complex of TNFR1 with bound TNF contains three TNFR1 chains and three TNF chains. (Banner et al., Cell, 73(3) 431-445 (1993).) The TNF ligand is present as a trimer, which is bound by three TNFR1 chains. (Id.) The three TNFR1 chains are clustered closely together in the receptor-ligand complex, and this clustering is a prerequisite to TNFR1-mediated signal transduction. In fact, multivalent agents that bind TNFR1, such as anti-TNFR1 antibodies, can induce TNFR1 clustering and signal transduction in the absence of TNF and are commonly used as TNFR1 agonists. (See, e.g., Belka et al., EMBO, 14(6):1156-1165 (1995); Mandik-Nayak et al., J. Immunol, 167:1920-1928 (2001).) Accordingly, multivalent agents that bind TNFR1, are generally not effective antagonists of TNFR1 even if they block the binding of TNFα to TNFR1.

[0111] The extracellular region of TNFR1 comprises a thirteen amino acid amino-terminal segment (amino acids 1-13 of SEQ ID NO:996 (human); amino acids 1-13 of SEQ ID NO:997 (mouse)), Domain 1 (amino acids 14-53 of SEQ ID NO:996 (human); amino acids 14-53 of SEQ ID NO:997 (mouse)), Domain 2 (amino acids 54-97 of SEQ ID NO:996 (human); amino acids 54-97 of SEQ ID NO:997 (mouse)), Domain 3 (amino acids 98-138 of SEQ ID NO:996 (human); amino acid 98-138 of SEQ ID NO:997 (mouse)), and Domain 4 (amino acids 139-167 of SEQ ID NO:996 (human); amino acids 139-167 of SEQ ID NO:997 (mouse)) which is followed by a membrane-proximal region (amino acids 168-182 of SEQ ID NO:996 (human); amino acids 168-183 SEQ ID NO:997 (mouse)). (See, Banner et al., Cell 73(3) 431-445 (1993) and Loetscher et al., Cell 61(2) 351-359 (1990).) Domains 2 and 3 make contact with bound ligand (TNFβ, TNFα). (Banner et al., Cell, 73(3) 431-445 (1993).) The extracellular region of TNFR1 also contains a region referred to as the pre-ligand binding assembly domain or PLAD domain (amino acids 1-53 of SEQ ID NO:996 (human); amino acids 1-53 of SEQ ID NO:997 (mouse)) (The Government of the USA, WO 01/58953; Deng et al., Nature Medicine, doi: 10.1038/nm1304 (2005)).

[0112] TNFR1 is shed from the surface of cells in vivo through a process that includes proteolysis of TNFR1 in Domain 4 or in the membrane-proximal region (amino acids 168-182 of SEQ ID NO:213, amino acids 168-183 of SEQ ID NO:215, respectively), to produce a soluble form of TNFR1. Soluble TNFR1 retains the capacity to bind TNFα, and thereby functions as an endogenous inhibitor of the activity of TNFα.

[0113] The extracellular region of human TNFR1 has the following amino acid sequence.

(SEQ ID NO:996)

LVPHLGDREKRDSVCPQGKYIHPQNNSICCTKCHKGTYLYNDCPGPGQDT
DCRECESGSFTASENHLRHCLSCSKCRKEMGQVEISSCTVDRDTVCGCRK
NQYRHYWSENLFQCFNCSLCLNGTVHLSCQEKQNTVCTCHAGFFLRENEC
VSCSNCKKSLECTKLCLPQIENVKGTEDSGTT

[0114] The extracellular region of murine (Mus musculus) TNFR1 has the following amino acid sequence.

(SEQ ID NO:997)

LVPSLGDREKRDSLCPQGKYVHSKNNSICCTKCHKGTYLVSDCPSPGRDT
VCRECEKGTFTASQNYLRQCLSCKTCRKEMSQVEISPCQADKDTVCGCKE
NQFQRYLSETHFQCVDCSPCFNGTVTIPCKETQNTVCNCHAGFFLRESEC
VPCSHCKKNEECMKLCLPPPLANVTNPQDSGTA

[0115] Anti-TNFR1 dAbs suitable for use in the invention (e.g. ligands described herein) have binding specificity for Tumor Necrosis Factor Receptor 1 (TNFR1; p55; CD120a). Preferably the antagonists of TNFR1 do not have binding specificity for Tumor Necrosis Factor 2 (TNFR2), or do not substantially antagonize TNFR2. An antagonist of TNFR1 does not substantially antagonize TNFR2 when the antagonist (1 mM, 10 nM, 100 nM, 1 μM, 10 μM or 100 μM) results in no more than about 5% inhibition of TNFR2-mediated activity induced by TNFα (100 pg/ml) in a standard cell assay. In certain embodiments, the dAb monomer that binds TNFR1 resists aggregation, unfolds reversibly and/or comprises a framework region as described above for dAb monomers that bind IL-1R1.

[0116] Suitable anti-TNFR1 dAbs and ligands that comprise such dAbs, do not induce cross-linking or clustering of TNFR1 on the surface of cells which can lead to activation of the receptor and signal transduction. In particular embodiments, the ligand comprises an anti-TNFR1 dAb that binds to Domain 1 of TNFR1. In more particular embodiments, the ligand comprises an anti-TNFR1 dAb that binds to Domain 1 of TNFR1, and competes with TAR2m-21-23 for binding to mouse TNFR1 or competes with TAR2h-205 for binding to human TNFR1.

[0117] In certain embodiments, the anti-TNFR1 dAb binds Domain 2 and/or Domain 3 of TNFR1. In particular embodiments, the anti-TNFR1 dAb competes with TAR2h-10-27, TAR2h-131-8, TAR2h-15-8, TAR2h-35-4, TAR2h-154-7, TAR2h-154-10 or TAR2h-185-25 for binding to TNFR1 (e.g., human and/or mouse TNFR1).

[0118] Preferably, anti-TNFR1 dAb monomers suitable for use in the ligands of the invention bind TNFR1 with a K_{d} of 300 mM to 5 pM (ie, 3×10⁻⁷ to 5×10⁻¹²M), preferably 50 nM to 20 pM, more preferably 5 nM to 200 pM and most preferably 1 nM to 100 pM, for example 1×10⁻⁷ M or less, preferably 1×10⁻⁸ M or less, more preferably 1×10⁻⁹ M or less, advantageously 1×10⁻¹⁰ M or less and most preferably 1×10⁻¹¹ M or less; and/or a K_{off} rate constant of 5×10⁻¹ s⁻¹ to 1×10⁻⁷ s⁻¹, preferably 1×10⁻² s⁻¹ to 1×10⁻⁶ s⁻¹, more preferably 5×10⁻³ s⁻¹ to 1×10⁻⁵ s⁻¹, for example 5×10⁻¹ s⁻¹ or less, preferably 1×10⁻² s⁻¹ or less, advantageously 1×10⁻³ s⁻¹ or less, more preferably 1×10⁻⁴ s⁻¹ or less, still more preferably 1×10⁻⁵ s⁻¹ or less, and most preferably 1×10⁻⁶ s⁻¹ or less as determined by surface plasmon resonance. (The K_{d}=K_{off}/Kₒₙ). Certain anti-TNFR1 dAb monomers suitable for use in the invention specifically bind human TNFR1 with a K_{d} of 50 nM to 20 pM, and a K_{off} rate constant of 5×10⁻¹ s⁻¹ to 1×10⁻⁷ s⁻¹, as determined by surface plasmon resonance.

[0119] Some anti-TNFR1 dAb monomers inhibit binding of TNFα to TNFR1. For example, some anti-TNFR1 dAb monomers inhibit binding of TNFα to TNFR1 with an inhibitory concentration 50 (IC50) of 500 nM to 50 pM, preferably 100 nM to 50 pM, more preferably 10 nM to 100 pM, advantageously 1 nM to 100 pM; for example 50 nM or less, preferably 5 nM or less, more preferably 500 pM or less, advantageously 200 pM or less, and most preferably 100 pM or less. Preferably, the TNFR1 is human TNFR1.

[0120] Other anti-TNFR1 dAb monomers do not inhibit binding of TNFα to TNFR1, but inhibit signal transduction mediated through TNFR1. For example, an anti-TNFR1 dAb monomer can inhibit TNFα-induced clustering of TNFR1, which precedes signal transduction through TNFR1. For example, certain anti-TNFR1 dAb monomers can bind TNFR1 and inhibit TNFR1-mediated signaling, but do not substantially inhibit binding of TNFα to TNFR1. For example, the anti-TNFR1 dAb monomer inhibits TNFα-induced crosslinking or clustering of TNFR1 on the surface of a cell. Such dAbs (e.g., TAR2m-21-23 described herein) are advantageous because they can antagonize cell surface TNFR1 but do not substantially reduce the inhibitory activity of endogenous soluble TNFR1. For example, the anti-TNFR1 dAb can bind TNFR1, but inhibits binding of TNFα to TNFR1 in a receptor binding assay by no more that about 10%, no more that about 5%, no more than about 4%, no more than about 3%, no more than about 2%, or no more than about 1%. Also, in these embodiments, the anti-TNFR1 dAb inhibits TNFα-induced crosslinking of TNFR1 and/or TNFR1-mediated signaling in a standard cell assay by at least about 10%, at least about 20%, at least about 30%, at least about 40%, at least about 50%, at least about 60%, at least about 70%, at least about 80%, at least about 90%, at least about 95%, or at least about 99%. Accordingly, administering a ligand that comprises such a dAb monomer to a mammal in need thereof can complement the endogenous regulatory pathways that inhibit the activity TNFα and the activity of TNFR1 in vivo.

[0121] Preferably, the ligand or dAb monomer neutralizes (inhibits the activity of) TNFR1 in a standard assay (e.g., the standard L929 or standard HeLa IL-8 assays described herein) with a neutralizing dose 50 (ND50) of 500 nM to 50 pM, preferably 100 nM to 50 pM, more preferably 10 nM to 100 pM, advantageously 1 nM to 100 pM; for example 50 nM or less, preferably 5 nM or less, more preferably 500 pM or less, advantageously 200 pM or less, and most preferably 100 pM or less. In other embodiments, the anti-TNFR1 dAb monomer binds TNFR1 and antagonizes the activity of the TNFR1 in a standard cell assay (e.g., the standard L929 or standard HeLa IL-8 assays described herein) with an ND₅₀ of ≦100 nM, and at a concentration of ≦10 μM the dAb agonizes the activity of the TNFR1 by ≦5% in the assay.

[0122] In other embodiments, the anti-TNFR1 dAb monomer specifically binds TNFR1 with a K_{d} described herein and inhibits lethality in a standard mouse LPS/D-galactosamine-induced septic shock model (i.e., prevents lethality or reduces lethality by at least about 10%, as compared with a suitable control). Preferably, the anti-TNFR1 dAb monomer inhibits lethality by at least about 25%, or by at least about 50%, as compared to a suitable control in a standard mouse LPS/D-galactosamine-induced septic shock model when administered at about 5 mg/kg or more preferably about 1 mg/kg.

[0123] In particular embodiments, the anti-TNFR1 dAb monomer or a ligand of the invention that comprises such a dAb monomer, does not substantially agonize TNFR1 (act as an agonist of TNFR1) in a standard cell assay, such as the standard L929 or standard HeLa IL-8 assays described herein (i.e., when present at a concentration of 1 nM, 10 nM, 100 nM, 1 μM, 10 μM, 100 μM, 1000 μM or 5,000 μM, results in no more than about 5% of the TNFR1-mediated activity induced by TNFα (100 pg/ml) in the assay).

[0124] In other embodiments, the ligand comprises a domain antibody (dAb) monomer that specifically binds Tumor Necrosis Factor Receptor 1 (TNFR1, p55, CD120a) with a K_{d} of 300 nM to 5 pM, and comprises an amino acid sequence that is at least about 80%, at least about 85%, at least about 90%, at least about 91%, at least about 92%, at least about 93%, at least about 94%, at least about 95%, at least about 96%, at least about 97%, at least about 98%, or at least about 99% homologous to the amino acid sequence or a dAb selected from the group consisting of TAR2h-12 (SEQ ID NO:785), TAR2h-13 (SEQ ID NO:786), TAR2h-14 (SEQ ID NO:787), TAR2h-16 (SEQ ID NO:788), TAR2h-17 (SEQ ID NO:789), TAR2h-18 (SEQ ID NO:790), TAR2h-19 (SEQ ID NO:791), TAR2h-20 (SEQ ID NO:792), TAR2h-21 (SEQ ID NO:793), TAR2h-22 (SEQ ID NO:794), TAR2h-23 (SEQ ID NO:795), TAR2h-24 (SEQ ID NO:796), TAR2h-25 (SEQ ID NO:797), TAR2h-26 (SEQ ID NO:798), TAR2h-27 (SEQ ID NO:799), TAR2h-29 (SEQ ID NO:800), TAR2h-30 (SEQ ID NO:801), TAR2h-32 (SEQ ID NO:802), TAR2h-33 (SEQ ID NO:803), TAR2h-10-1 (SEQ ID NO:804), TAR2h-10-2 (SEQ ID NO:805), TAR2h-10-3 (SEQ ID NO:806), TAR2h-10-4 (SEQ ID NO:807), TAR2h-10-5 (SEQ ID NO: 808), TAR2h-10-6 (SEQ ID NO: 809), TAR2h-10-7 (SEQ ID NO:810), TAR2h-10-8 (SEQ ID NO:811), TAR2h-10-9 (SEQ ID NO:812), TAR2h-10-10 (SEQ ID NO:813), TAR2h-10-11 (SEQ ID NO:814), TAR2h-10-12 (SEQ ID NO:815), TAR2h-10-13 (SEQ ID NO: 816), TAR2h-10-14 (SEQ ID NO:817), TAR2h-10-5 (SEQ ID NO:818), TAR2h-10-16 (SEQ ID NO:819), TAR2h-10-17 (SEQ ID NO:820), TAR2h-10-18 (SEQ ID NO:821), TAR2h-10-19 (SEQ ID NO:822), TAR2h-10-20 (SEQ ID NO:823), TAR2h-10-21 (SEQ ID NO:824), TAR2h-10-22 (SEQ ID NO:825), TAR2h-10-27 (SEQ ID NO:826), TAR2h-10-29 (SEQ ID NO:827), TAR2h-10-31 (SEQ ID NO:828), TAR2h-10-35 (SEQ ID NO:829), TAR2h-10-36 (SEQ ID NO:830), TAR2h-10-37 (SEQ ID NO:831), TAR2h-10-38 (SEQ ID NO:832), TAR2h-10-45 (SEQ ID NO:833), TAR2h-10-47 (SEQ ID NO:834), TAR2h-10-48 (SEQ ID NO:835), TAR2h-10-57 (SEQ ID NO:836), TAR2h-10-56 SEQ ID NO:837), TAR2h-10-58 (SEQ ID NO:838), TAR2h-10-66 (SEQ ID NO:839), TAR2h-10-64 (SEQ ID NO:840), TAR2h-10-65 (SEQ ID NO:841), TAR2h-10-68 (SEQ ID NO:842), TAR2h-10-69 (SEQ ID NO:843), TAR2h-10-67 (SEQ ID NO:844), TAR2h-10-61 (SEQ ID NO:845), TAR2h-10-62 (SEQ ID NO:846), TAR2h-10-63 (SEQ ID NO:847), TAR2h-10-60 (SEQ ID NO:848), TAR2h-10-55 (SEQ ID NO:849), TAR2h-10-59 (SEQ ID NO:850), TAR2h-10-70 (SEQ ID NO:851), TAR2h-34 (SEQ ID NO:852), TAR2h-35 (SEQ ID NO:853), TAR2h-36 (SEQ ID NO:854), TAR2h-37 (SEQ ID NO:855), TAR2h-38 (SEQ ID NO:856), TAR2h-39 (SEQ ID NO:857), TAR2-40 (SEQ ID NO:858), TAR2h-41 (SEQ ID NO:859), TAR2h-42 (SEQ ID NO:860), TAR2h-43 (SEQ ID NO:861), TAR2h-44 (SEQ ID NO:862), TAR2h-45 (SEQ ID NO:863), TAR2h-47 (SEQ ID NO:864), TAR2h-48 (SEQ ID NO:865), TAR2h-50 (SEQ ID NO:866), TAR2h-51 (SEQ ID NO:867), TAR2h-66 (SEQ ID NO:868), TAR2h-67 (SEQ ID NO:869), TAR2h-68 (SEQ ID NO:870), TAR2h-70 (SEQ ID NO:871), TAR2h-71 (SEQ ID NO:872), TAR2h-72 (SEQ ID NO:873), TAR2h-73 (SEQ ID NO:874), TAR2h-74 (SEQ ID NO:875), TAR2h-75 (SEQ ID NO:876), TAR2h-76 (SEQ ID NO:877), TAR2h-77 (SEQ ID NO:878), TAR2h-78 (SEQ ID NO:879), TAR2h-79 (SEQ ID NO:880), TAR2h-15 (SEQ ID NO:881), TAR2h-131-8 (SEQ ID NO:882), TAR2h-131-24 (SEQ ID NO:883), TAR2h-15-8 (SEQ ID NO:884), TAR2h-15-8-1 (SEQ ID NO:885), TAR2h-15-8-2 (SEQ ID NO:886), TAR2h-185-23 (SEQ ID NO:887), TAR2h-154-10-5 (SEQ ID NO:888), TAR2h-14-2 (SEQ ID NO:889), TAR2h-151-8 (SEQ ID NO:890), TAR2h-152-7 (SEQ ID NO:891), TAR2h-35-4 (SEQ ID NO:892), TAR2h-154-7 (SEQ ID NO:893), TAR2h-80 (SEQ ID NO:894), TAR2h-81 (SEQ ID NO:895), TAR2h-82 (SEQ ID NO:896), TAR2h-83 (SEQ ID NO:897), TAR2h-84 (SEQ ID NO:898), TAR2h-85 (SEQ ID NO:899), TAR2h-86 (SEQ ID NO:900), TAR2h-87 (SEQ ID NO:901), TAR2h-88 (SEQ ID NO:902), TAR2h-89 (SEQ ID NO:903), TAR2h-90 (SEQ ID NO:904), TAR2h-91 (SEQ ID NO:905), TAR2h-92 (SEQ ID NO:906), TAR2h-93 (SEQ ID NO:907), TAR2h-94 (SEQ ID NO:908), TAR2h-95 (SEQ ID NO:909), TAR2h-96 (SEQ ID NO:910), TAR2h-97 (SEQ ID NO:911), TAR2h-99 (SEQ ID NO:912), TAR2h-100 (SEQ ID NO:913), TAR2h-101 (SEQ ID NO:914), TAR2h-102 (SEQ ID NO:915), TAR2h-103 (SEQ ID NO:916), TAR2h-104 (SEQ ID NO:917), TAR2h-105 (SEQ ID NO:918), TAR2h-106 (SEQ ID NO:919), TAR2h-107 (SEQ ID NO:920), TAR2h-108 (SEQ ID NO:921), TAR2h-109 (SEQ ID NO:922), TAR2h-110 (SEQ ID NO:923), TAR2h-111 (SEQ ID NO:924), TAR2h-112 (SEQ ID NO:925), TAR2h-113 (SEQ ID NO:926), TAR2h-114 (SEQ ID NO:927), TAR2h-115 (SEQ ID NO:928), TAR2h-116 (SEQ ID NO:929), TAR2h-117 (SEQ ID NO:930), TAR2h-118 (SEQ ID NO:931), TAR2h-119 (SEQ ID NO:932), TAR2h-120 (SEQ ID NO:933), TAR2h-121 (SEQ ID NO:934), TAR2h-122 (SEQ ID NO:935), TAR2h-123 (SEQ ID NO:936), TAR2h-124 (SEQ ID NO:937), TAR2h-125 (SEQ ID NO:938), TAR2h-126 (SEQ ID NO:939), TAR2h-127 (SEQ ID NO:940), TAR2h-128 (SEQ ID NO:941), TAR2h-129 (SEQ ID NO:942), TAR2h-130 (SEQ ID NO:943), TAR2h-131 (SEQ ID NO:944), TAR2h-132 (SEQ ID NO:945), TAR2h-133 (SEQ ID NO:946), TAR2h-151 (SEQ ID NO:947), TAR2h-152 (SEQ ID NO:948), TAR2h-153 (SEQ ID NO:949), TAR2h-154 (SEQ ID NO:950), TAR2h-159 (SEQ ID NO:951), TAR2h-165 (SEQ ID NO:952), TAR2h-166 (SEQ ID NO:953), TAR2h-168 (SEQ ID NO:954), TAR2h-171 (SEQ ID NO:955), TAR2h-172 (SEQ ID NO:956), TAR2h-173 (SEQ ID NO:957), TAR2h-174 (SEQ ID NO:958), TAR2h-176 (SEQ ID NO:959), TAR2h-178 (SEQ ID NO:960), TAR2h-201 (SEQ ID NO:961), TAR2h-202 (SEQ ID NO:962), TAR2h-203 (SEQ ID NO:963), TAR2h-204 (SEQ ID NO:964), TAR2h-185-25 (SEQ ID NO:965), TAR2h-154-10 SEQ ID NO:966), TAR2h-205 (SEQ ID NO:967), TAR2h-10 (SEQ ID NO:968), TAR2h-5 (SEQ ID NO:969), TAR2h-5d1 (SEQ ID NO:970), TAR2h-5d2 (SEQ ID NO:971), TAR2h-5d3 (SEQ ID NO:972), TAR2h-5d4 (SEQ ID NO:973), TAR2h-5d5 (SEQ ID NO:974), TAR2h-5d6 (SEQ ID NO:975), TAR2h-5d7 (SEQ ID NO:976), TAR2h-5d8 (SEQ ID NO:977), TAR2h-5d9 (SEQ ID NO:978), TAR2h-5d10 (SEQ ID NO:979), TAR2h-5d11 (SEQ ID NO:980), TAR2h-5d12 (SEQ ID NO:981), and TAR2h-5d13 (SEQ ID NO:982).

[0125] In other embodiments, the ligand comprises a domain antibody (dAb) monomer that specifically binds Tumor Necrosis Factor Receptor 1 (TNFR1, p55, CD120a) with a K_{d} of 300 nM to 5 pM, and competes for binding to human TNFR1 with a dAb selected from the group consisting of TAR2h-12 (SEQ ID NO:785), TAR2h-13 (SEQ ID NO:786), TAR2h-14 (SEQ ID NO:787), TAR2h-16 (SEQ ID NO:788), TAR2h-17 (SEQ ID NO:789), TAR2h-18 (SEQ ID NO:790), TAR2h-19 (SEQ ID NO:791), TAR2h-20 (SEQ ID NO:792), TAR2h-21 (SEQ ID NO:793), TAR2h-22 (SEQ ID NO:794), TAR2h-23 (SEQ ID NO:795), TAR2h-24 (SEQ ID NO:796), TAR2h-25 (SEQ ID NO:797), TAR2h-26 (SEQ ID NO:798), TAR2h-27 (SEQ ID NO:799), TAR2h-29 (SEQ ID NO:800), TAR2h-30 (SEQ ID NO:801), TAR2h-32 (SEQ ID NO:802), TAR2h-33 (SEQ ID NO:803), TAR2h-10-1 (SEQ ID NO:804), TAR2h-10-2 (SEQ ID NO:805), TAR2h-10-3 (SEQ ID NO:806), TAR2h-10-4 (SEQ ID NO:807), TAR2h-10-5 (SEQ ID NO:808), TAR2h-10-6 (SEQ ID NO:809), TAR2h-10-7 (SEQ ID NO:810), TAR2h-10-8 (SEQ ID NO:811), TAR2h-10-9 (SEQ ID NO:812), TAR2h-10-10 (SEQ ID NO:813), TAR2h-10-11 (SEQ ID NO:814), TAR2h-10-12 (SEQ ID NO:815), TAR2h-10-13 (SEQ ID NO:816), TAR2h-10-14 (SEQ ID NO:817), TAR2h-10-15 (SEQ ID NO:818), TAR2h-10-16 (SEQ ID NO:819), TAR2h-10-17 (SEQ ID NO:820), TAR2h-10-18 (SEQ ID NO:821), TAR2h-10-19 (SEQ ID NO:822), TAR2h-10-20 (SEQ ID NO:823), TAR2h-10-21 (SEQ ID NO:824), TAR2h-10-22 (SEQ ID NO:825), TAR2h-10-27 (SEQ ID NO:826), TAR2h-10-29 (SEQ ID NO:827), TAR2h-10-31 (SEQ ID NO:828), TAR2h-10-35 (SEQ ID NO:829), TAR2h-10-36 (SEQ ID NO:830), TAR2h-10-37 (SEQ ID NO:831), TAR2h-10-38 (SEQ ID NO:832), TAR2h-10-45 (SEQ ID NO:833), TAR2h-10-47 (SEQ ID NO:834), TAR2h-10-48 (SEQ ID NO:835), TAR2h-10-57 (SEQ ID NO:836), TAR2h-10-56 SEQ ID NO:837), TAR2h-10-58 (SEQ ID NO:838), TAR2h-10-66 (SEQ ID NO:839), TAR2h-10-64 (SEQ ID NO:840), TAR2h-10-65 (SEQ ID NO:841), TAR2h-10-68 (SEQ ID NO:842), TAR2h-10-69 (SEQ ID NO:843), TAR2h-10-67 (SEQ ID NO:844), TAR2h-10-61 (SEQ ID NO:845), TAR2h-10-62 (SEQ ID NO:846), TAR2h-10-63 (SEQ ID NO:847), TAR2h-10-60 (SEQ ID NO:848), TAR2h-10-55 (SEQ ID NO:849), TAR2h-10-59 (SEQ ID NO:850), TAR2h-10-70 (SEQ ID NO:851), TAR2h-34 (SEQ ID NO:852), TAR2h-35 (SEQ ID NO:853), TAR2h-36 (SEQ ID NO:854), TAR2h-37 (SEQ ID NO:855), TAR2h-38 (SEQ ID NO:856), TAR2h-39 (SEQ ID NO:857), TAR2h-40 (SEQ ID NO:858), TAR2h-41 (SEQ ID NO:859), TAR2h-42 (SEQ ID NO:860), TAR2h-43 (SEQ ID NO:861), TAR2h-44 (SEQ ID NO:862), TAR2h-45 (SEQ ID NO:863), TAR2h-47 (SEQ ID NO:864), TAR2h-48 (SEQ ID NO:865), TAR2h-50 (SEQ ID NO:866), TAR2h-51 (SEQ ID NO:867), TAR2h-66 (SEQ ID NO:868), TAR2h-67 (SEQ ID NO:869), TAR2h-68 (SEQ ID NO:870), TAR2h-70 (SEQ ID NO:871), TAR2h-71 (SEQ ID NO:872), TAR2h-72 (SEQ ID NO:873), TAR2h-73 (SEQ ID NO:874), TAR2h-74 (SEQ ID NO:875), TAR2h-75 (SEQ ID NO:876), TAR2h-76 (SEQ ID NO:877), TAR2h-77 (SEQ ID NO:878), TAR2h-78 (SEQ ID NO:879), TAR2h-79 (SEQ ID NO:880), TAR2h-15 (SEQ ID NO:881), TAR2h-131-8 (SEQ ID NO:882), TAR2h-131-24 (SEQ ID NO:883), TAR2h-15-8 (SEQ ID NO:884), TAR2h-15-8-1 (SEQ ID NO:885), TAR2h-15-8-2 (SEQ ID NO:886), TAR2h-185-23 (SEQ ID NO:887), TAR2h-154-10-5 (SEQ ID NO:888), TAR2h-14-2 (SEQ ID NO:889), TAR2h-151-8 (SEQ ID NO:890), TAR2h-152-7 (SEQ ID NO:891), TAR2h-35-4 (SEQ ID NO:892), TAR2h-154-7 (SEQ ID NO:893), TAR2h-80 (SEQ ID NO:894), TAR2h-81 (SEQ ID NO:895), TAR2h-82 (SEQ ID NO:896), TAR2h-83 (SEQ ID NO:897), TAR2h-84 (SEQ ID NO:898), TAR2h-85 (SEQ ID NO:899), TAR2h-86 (SEQ ID NO:900), TAR2h-87 (SEQ ID NO:901), TAR2h-88 (SEQ ID NO:902), TAR2h-89 (SEQ ID NO:903), TAR2h-90 (SEQ ID NO:904), TAR2h-91 (SEQ ID NO:905), TAR2h-92 (SEQ ID NO:906), TAR2h-93 (SEQ ID NO:907), TAR2h-94 (SEQ ID NO:908), TAR2h-95 (SEQ ID NO:909), TAR2h-96 (SEQ ID NO:910), TAR2h-97 (SEQ ID NO:911), TAR2h-99 (SEQ ID NO:912), TAR2h-100 (SEQ ID NO:913), TAR2h-101 (SEQ ID NO:914), TAR2h-102 (SEQ ID NO:915), TAR2h-103 (SEQ ID NO:916), TAR2h-104 (SEQ ID NO:917), TAR2h-105 (SEQ ID NO:918), TAR2h-106 (SEQ ID NO:919), TAR2h-107 (SEQ ID NO:920), TAR2h-108 (SEQ ID NO:921), TAR2h-109 (SEQ ID NO:922), TAR2h-110 (SEQ ID NO:923), TAR2h-111 (SEQ ID NO:924), TAR2h-112 (SEQ ID NO:925), TAR2h-113 (SEQ ID NO:926), TAR2h-114 (SEQ ID NO:927), TAR2h-115 (SEQ ID NO:928), TAR2h-116 (SEQ ID NO:929), TAR2h-117 (SEQ ID NO:930), TAR2h-118 (SEQ ID NO:931), TAR2h-119 (SEQ ID NO:932), TAR2h-120 (SEQ ID NO:933), TAR2h-121 (SEQ ID NO:934), TAR2h-122 (SEQ ID NO:935), TAR2h-123 (SEQ ID NO:936), TAR2h-124 (SEQ ID NO:937), TAR2h-125 (SEQ ID NO:938), TAR2h-126 (SEQ ID NO:939), TAR2h-127 (SEQ ID NO:940), TAR2h-128 (SEQ ID NO:941), TAR2h-129 (SEQ ID NO:942), TAR2h-130 (SEQ ID NO:943), TAR2h-131 (SEQ ID NO:944), TAR2h-132 (SEQ ID NO:945), TAR2h-133 (SEQ ID NO:946), TAR2h-151 (SEQ ID NO:947), TAR2h-152 (SEQ ID NO:948), TAR2h-153 (SEQ ID NO:949), TAR2h-154 (SEQ ID NO:950), TAR2h-159 (SEQ ID NO:951), TAR2h-165 (SEQ ID NO:952), TAR2h-166 (SEQ ID NO:953), TAR2h-168 (SEQ ID NO:954), TAR2h-171 (SEQ ID NO:955), TAR2h-172 (SEQ ID NO:956), TAR2h-173 (SEQ ID NO:957), TAR2h-174 (SEQ ID NO:958), TAR2h-176 (SEQ ID NO:959), TAR2h-178 (SEQ ID NO:960), TAR2h-201 (SEQ ID NO:961), TAR2h-202 (SEQ ID NO:962), TAR2h-203 (SEQ ID NO:963), TAR2h-204 (SEQ ID NO:964), TAR2h-185-25 (SEQ ID NO:965), TAR2h-154-10 SEQ ID NO:966), TAR2h-205 (SEQ ID NO:967), TAR2h-10 (SEQ ID NO:968), TAR2h-5 (SEQ ID NO:969), TAR2h-5d1 (SEQ ID NO:970), TAR2h-5d2 (SEQ ID NO:971), TAR2h-5d3 (SEQ ID NO:972), TAR2h-5d4 (SEQ ID NO:973), TAR2h-5d5 (SEQ ID NO:974), TAR2h-5d6 (SEQ ID NO:975), TAR2h-5d7 (SEQ ID NO:976), TAR2h-5d8 (SEQ ID NO:977), TAR2h-5d9 (SEQ ID NO:978), TAR2h-5d10 (SEQ ID NO:979), TAR2h-5d11 (SEQ ID NO:980), TAR2h-5d12 (SEQ ID NO:981), and TAR2h-5d13 (SEQ ID NO:982).

[0126] In other embodiments, the ligand comprises a domain antibody (dAb) monomer that specifically binds Tumor Necrosis Factor Receptor 1 (TNFR1, p55, CD120a) with a K_{d} of 300 nM to 5 pM, and comprises an amino acid sequence that is at least about 80%, at least about 85%, at least about 90%, at least about 91%, at least about 92%, at least about 93%, at least about 94%, at least about 95%, at least about 96%, at least about 97%, at least about 98%, or at least about 99% homologous to the amino acid sequence or a dAb selected from the group consisting of TAR2m-14 (SEQ ID NO:983), TAR2m-15 (SEQ ID NO:984), TAR2m-19 (SEQ ID NO:985), TAR2m-20 (SEQ ID NO:986), TAR2m-21 (SEQ ID NO:987), TAR2m-24 (SEQ ID NO:988), TAR2m-21-23 (SEQ ID NO:989), TAR2m-21-07 (SEQ ID NO:990), TAR2m-21-43 (SEQ ID NO:991), TAR2m-21-48 (SEQ ID NO:992), TAR2m-21-10 (SEQ ID NO:993), TAR2m-21-06 (SEQ ID NO:994), and TAR2m-21-17 (SEQ ID NO:995).

[0127] In some embodiments, the ligand comprises a dAb monomer that binds TNFR1 and competes with any of the dAbs disclosed herein for binding to TNFR1 (e.g., mouse and/or human TNFR1).

Protease Resistant dAbs

[0128] The invention also relates to dAb monomers that are resistant to protease (e.g., serine protease, cysteine protease, matrix metalloprotease, pepsin, trypsin, elastase, chymotrypsin, carboxypeptidase, cathepsin (e.g., cathepsin G), proteinase 3) degradation and to ligands that comprise a protease resistant dAb. Proteases (e.g., a serine protease, cysteine protease, matrix metalloprotease) function in the normal turn over and metabolism of proteins. However, in certain physiological states, such as inflammatory states (e.g., COPD) and cancer, the amount of proteases present in a tissue, organ or animal (e.g., in the lung, in or adjacent to a tumor) can increase. This increase in proteases can result in accelerated degradation and inactivation of endogenous proteins and of therapeutic peptides, polypeptides and proteins that are administered. In fact, some agents that have potential for in vivo use (e.g., use in treating, diagnosing or preventing disease) have only limited efficacy because they are rapidly degraded and inactivated by proteases.

[0129] The invention relates to a dAb or a ligand comprising a dAb that is resistant to protease degradation. The protease resistant dAbs of the invention provide several advantages. For example, a protease resistant dAb can be administered to a subject and remain active in vivo longer than protease sensitive agents. Accordingly, protease resistant dAbs will remain functional for a period of time that is sufficient to produce biological effects.

[0130] A dAb that is resistant to protease degradation is not substantially degraded by a protease when incubated with the protease under conditions suitable for protease activity for at least about 2 hours, at least about 3 hours, at least about 4 hours, at least about 5 hours, at least about 6 hours, at least about 7 hours, at least about 8 hours, at least about 9 hours, at least about 10 hours, at least about 11 hours, at least about 12 hours, at least about 24 hours, at least about 36 hours, or at least about 48 hours. A dAb is not substantially degraded when no more than about 25%, no more than about 20%, no more than about 15%, no more than about 14%, no more than about 13%, no more than about 12%, no more than about 11%, no more than about 10%, no more than about 9%, no more than about 8%, no more than about 7% no more than about 6%, no more than about 5%, no more than about 4%, no more than about 3%, no more than about 2%, no more than about 1%, or substantially none of the protein is degraded by protease after incubation with the protease for at least about 2 hours. Protein degradation can be assessed using any suitable method, for example, by SDS-PAGE as described herein.

[0131] Protease resistance can be assessed using any suitable method. For example, a protease can be added to a solution of dAb in a suitable buffer (e.g., PBS) to produce a dAb/protease solution, such as a solution of at least about 0.01% (w/w) protease, about 0.01% to about 5% (w/w) protease, about 0.05% to about 5% (w/w) protease, about 0.1% to about 5% (w/w) protease, about 0.5% to about 5% (w/w) protease, about 1% to about 5% (w/w) protease, at least about 0.01% (w/w) protease, at least about 0.02% (w/w) protease, at least about 0.03% (w/w) protease, at least about 0.04% (w/w) protease, at least about 0.05% (w/w) protease, at least about 0.06% (w/w) protease, at least about 0.07% (w/w) protease, at least about 0.08% (w/w) protease, at least about 0.09% (w/w) protease, at least about 0.1% (w/w) protease, at least about 0.2% (w/w) protease, at least about 0.3% (w/w) protease, at least about 0.4% (w/w) protease, at least about 0.5% (w/w) protease, at least about 0.6% (w/w) protease, at least about 0.7% (w/w) protease, at least about 0.8% (w/w) protease, at least about 0.9% (w/w) protease, at least about 1% (w/w) protease, at least about 2% (w/w) protease, at least about 3% (w/w) protease, at least about 4% (w/w) protease, or about 5% (w/w) protease. The dAb/protease mixture can be incubated at a suitable temperature for protease activity (e.g., at 37° C.) and samples can be taken at time intervals (e.g., at 1 hour, 2 hours, 3 hours, etc.) and the protease reaction stopped. The samples can then be analyzed for protein degradation using any suitable method, such as SDS-PAGE analysis. The results can be used to establish a time course of degradation.

[0132] In particular embodiments, the protease resistant dAb is resistant to degradation by elastase. For example, the elastase resistant dAb is not substantially degraded when incubated at 37° C. in a 0.04% (w/w) solution of elastase for a period of at least about 2 hours. Preferably, the elastase resistant dAb is not substantially degraded when incubated at 37° C. in a 0.04% (w/w) solution of elastase for a period of at least about 12 hours. More preferably, the elastase resistant dAb is not substantially degraded when incubated at 37° C. in a 0.04% (w/w) solution of elastase for a period of at least about 24 hours, at least about 36 hours, or at least about 48 hours.

[0133] In particular embodiments, the protease resistant dAb is resistant to degradation by trypsin. For example, the trypsin resistant dAb is not substantially degraded when incubated at 37° C. in a 0.04% (w/w) solution of trypsin for a period of at least about 2 hours. Preferably, the trypsin resistant dAb is not substantially degraded when incubated at 37° C. in a 0.04% (w/w) solution of trypsin for a period of at least about 3 hours. More preferably, the trypsin resistant dAb is not substantially degraded when incubated at 37° C. in a 0.04% (w/w) solution of trypsin for a period of at least about 4 hours, at least about 5 hours, at least about 6 hours, at least about 7 hours, at least about 8 hours, at least about 9 hours, at least about 10 hours, at least about 11 hours, or at least about 12 hours.

[0134] In certain embodiments, the invention does not include TAR1-5-19 disclosed in WO 2004/081026.

[0135] Preferably, the protease resistant dAb is a light chain variable domain. For example, the protease resistant dAb can be a Vκ or a Vλ.

[0136] Protease resistance of dAbs can correlate with the melting temperature (Tm) of the dAbs. Generally, a higher melting temperature correlates with protease resistance. In some embodiments, the protease resistant dAb has a Tm between about 40° C. and about 95° C., about 40° C. and about 85° C., about 40° C. and about 80° C., about 45° C. and about 95° C., about 45° C. and about 85° C., 45° C. and about 80° C., at least about 40° C., at least about 45° C., at least about 50° C., at least about 55° C., at least about 60° C., at least about 65° C., at least about 70° C., at least about 75° C., at least about 80° C., at least about 85° C., at least about 90° C., or at least about 95° C.

[0137] The protease resistant dAb can have binding specificity for any desired target, such as human or animal proteins, including cytokines, growth factors, cytokine receptors, growth factor receptors, enzymes (e.g., proteases), co-factors for enzymes and DNA binding proteins, lipids and carbohydrates. Suitable targets, including cytokines, growth factors, cytokine receptors, growth factor receptors and other proteins include but are not limited to: ApoE, Apo-SAA, BDNF, Cardiotrophin-1, CEA, CD40, CD40 Ligand, CD56, CD38, CD138, EGF, EGF receptor, ENA-78, Eotaxin, Eotaxin-2, Exodus-2, FAPα, FGF-acidic, FGF-basic, fibroblast growth factor-10, FLT3 ligand, Fractalkine (CX3C), GDNF, G-CSF, GM-CSF, GP-β1, human serum albumin, insulin, IFN-γ, IGF-I, IGF-II, IL-1α, IL-1β, IL-1 receptor, IL-1 receptor type 1, IL-2, IL-3, IL-4, IL-5, IL-6, IL-7, IL-8 (72 a.a.), IL-8 (77 a.a.), IL-9, IL-10, IL-11, IL-12, IL-13, IL-15, IL-16, IL-17, IL-18 (IGIF), Inhibin α, Inhibin β, IP-10, keratinocyte growth factor-2 (KGF-2), KGF, Leptin, LIF, Lymphotactin, Mullerian inhibitory substance, monocyte colony inhibitory factor, monocyte attractant protein, M-CSF, MDC (67 a.a.), MDC (69 a.a.), MCP-1 (MCAF), MCP-2, MCP-3, MCP-4, MDC (67 a.a.), MDC (69 a.a.), MIG, MIP-1α, MIP-1β, MIP-3α, MIP-3β, MIP-4, myeloid progenitor inhibitor factor-1 (MPIF-1), NAP-2, Neurturin, Nerve growth factor, β-NGF, NT-3, NT-4, Oncostatin M, PDGF-AA, PDGF-AB, PDGF-BB, PF-4, RANTES, SDF1α, SDF1β, SCF, SCGF, stem cell factor (SCF), TARC, TGF-α, TGF-β, TGF-β2, TGF-β3, tumour necrosis factor (TNF), TNF-α, TNF-β, TNF receptor I, TNF receptor II, TNIL-1, TPO, VEGF, VEGF A, VEGF B, VEGF C, VEGF D, VEGF receptor 1, VEGF receptor 2, VEGF receptor 3, GCP-2, GRO/MGSA, GRO-β, GRO-γ, HCC1, 1-309, HER 1, HER 2, HER 3, HER 4, serum albumin, vWF, amyloid proteins (e.g., amyloid alpha), MMP12, PDK1, IgE, and other targets disclosed herein. It will be appreciated that this list is by no means exhaustive.

[0138] In some embodiments, the protease resistant dAbs binds a target in pulmonary tissue, such as a target selected from the group consisting of TNFR1, IL-1, IL-1R, IL-4, IL-4R, IL-5, IL-6, IL-6R, IL-8, IL-8R, IL-9, IL-9R, IL-10, IL-12 IL-12R, IL-13, IL-13Rα1, IL-13Ra2, IL-15, IL-15R, IL-16, IL-17R, IL-17, IL-18, IL-18R, IL-23 IL-23R, IL-25, CD2, CD4, CD11a, CD23, CD25, CD27, CD28, CD30, CD40, CD40L, CD56, CD138, ALK5, EGFR, FcER1, TGFb, CCL2, CCL18, CEA, CR8, CTGF, CXCL12 (SDF-1), chymase, FGF, Furin, Endothelin-1, Eotaxins (e.g., Eotaxin, Eotaxin-2, Eotaxin-3), GM-CSF, ICAM-1, ICOS, IgE, IFNa, 1-309, integrins, L-selectin, MIF, MIP4, MDC, MCP-1, MMPs, neutrophil elastase, osteopontin, OX-40, PARC, PD-1, RANTES, SCF, SDF-1, siglec8, TARC, TGFb, Thrombin, Tim-1, TNF, TRANCE, Tryptase, VEGF, VLA-4, VCAM, α4β7, CCR2, CCR3, CCR4, CCR5, CCR7, CCR8, alphavbeta6, alphavbeta8, cMET, CD8, vWF, amyloid proteins (e.g., amyloid alpha), MMP12, PDK1, and IgE.

[0139] The protease resistant dAbs of the invention can be administered in vivo and will remain functional longer than compounds that are not similarly resistant to protease degradation. A dAb of the invention that is resistant to protease degradation can be used for treating an inflammatory disease (e.g., by local delivery to the lung by pulmonary administration, e.g., by intranasal administration, e.g., by inhalation). For example, by administering to a subject in need thereof a therapeutically effective amount of a dAb monomer that is resistant to protease degradation. The invention also relates to a dAb monomer that is resistant to protease degradation for use in therapy, diagnosis and/or prophylaxis, and to the use of such a dAb monomer of the invention for the manufacture of a medicament for treating a disease described herein (e.g., and inflammatory disease, arthritis, a respiratory disease).

[0140] In particular embodiments, the protease resistant dAb monomer can be used for treating an inflammatory disease, arthritis, or a respiratory disease via pulmonary administration. The protease resistant dAb monomer can also be used in the manufacture of a medicament for the treatment of an inflammatory disease, arthritis, or a respiratory disease wherein the dAb monomer is administered via pulmonary administration. Elastase and trypsin are the most common proteases found in the lung. Preferably, protease resistant dAbs for pulmonary administration are elastase resistant, trypsin resistant, or elastase resistant and trypsin resistant.

[0141] In particular embodiments, the protease resistant dAb monomer (e.g., elastase resistant dAb monomer) binds IL-1R1 and inhibits binding of IL-1 (e.g., IL-1α and/or IL-1β) to the receptor but does not inhibit binding of IL-1ra to IL-1R1, and to ligands comprising such dAb monomers. Such dAb monomers are useful as therapeutic agents for treating inflammation, disease or other condition mediated in whole or in part by biological functions induced by binding of IL-1 to IL-1R1 (e.g., local or systemic inflammation, elaboration of inflammatory mediators (e.g., IL-6, Il-8, TNF), fever, activation immune cells (e.g., lymphocytes, neutrophils), anorexia, hypotension, leucopenia, thrombocytopenia.) The protease resistant dAb monomers can bind IL-1R1 and inhibit IL-1R1 function without interfering with endogenous IL-1R1 inhibitory pathways, such as binding of endogenous IL-1ra to endogenous IL-1R1. Accordingly, such a dAb monomer can be administered to a subject to complement the endogenous regulatory pathways that inhibit the activity of IL-1R1 or IL-1 in vivo. In addition, protease resistant dAb monomers that bind and IL-1R1 do not inhibit binding of IL-1ra to IL-1R1 provide advantages for use as diagnostic agents, because they can be used to bind and detect, quantify or measure IL-1R1 in a sample and will not compete with IL-1ra in the sample for binding to IL-1R1. Accordingly, an accurate determination of whether or how much IL-1R1 is in the sample can be made.

[0142] Protease resistant dAb monomers (e.g., elastase resistant dAb monomers) that bind IL-1R1 and inhibit binding of IL-1 (e.g., IL-1α and/or IL-1β) to the receptor but do not inhibit binding of IL-1ra to IL-1R1 are also useful research tools. For example, such a dAb monomer can be used to identify agents (e.g., other dAbs, small organic molecules) that bind IL-1R1 and but do not inhibit binding of IL-1ra to IL-1R1. In one illustrative example, an agent or collection of agents to be tested for the ability to inhibit binding of IL-1 to IL-1R1 are assayed in a competitive IL-1R1 receptor binding assay, such as the receptor binding assay described herein. Agents that inhibit binding of IL-1 to IL-1R1 in such an assay can then be studied in a similar competitive IL-1R1 receptor binding assay to see if they compete with a dAb monomer that binds IL-1R1 but does not inhibit binding of IL-1ra to IL-1R1. Competitive binding in such an assay indicates that the agent binds IL-1R1 and inhibits binding of IL-1 to the receptor but does not inhibit binding of IL-1ra to the receptor.

[0143] In some embodiments, the protease resistant dAb binds IL-1R1 and competes with any of the dAbs disclosed herein for binding to IL-1R1 (e.g., human IL-1R1). In some embodiments the dAb is resistant to at least elastase and/or trypsin.

[0144] In other embodiments, the protease resistant dAb competes for binding to IL-1R1 with an anti-IL-1R1 dAb, wherein the anti-IL-1R1 dAb comprises an amino acid sequence that is at least about 80%, at least about 85%, at least about 90%, at least about 91%, at least about 92%, at least about 93%, at least about 94%, at least about 95%, at least about 96%, at least about 97%, at least about 98%, or at least about 99% homologous to the amino acid sequence or a dAb selected from the group consisting of SEQ ID NO:1 through SEQ ID NO:349.

[0145] In other embodiments, the protease resistant dAb competes for binding to IL-1R1 with an anti-IL-1R1 dAb, wherein the anti-IL-1R1 dAb comprises an amino acid sequence that is at least about 80%, at least about 85%, at least about 90%, at least about 91%, at least about 92%, at least about 93%, at least about 94%, at least about 95%, at least about 96%, at least about 97%, at least about 98%, or at least about 99% homologous to the amino acid sequence or a dAb selected from the group consisting of SEQ ID NO:1 or SEQ ID NO:2.

[0146] In other embodiments, the protease resistant dAb competes for binding to IL-1R1 with an anti-IL-1R1 dAb, wherein the anti-IL-1R1 dAb comprises an amino acid sequence that is at least about 80%, at least about 85%, at least about 90%, at least about 91%, at least about 92%, at least about 93%, at least about 94%, at least about 95%, at least about 96%, at least about 97%, at least about 98%, or at least about 99% homologous to the amino acid sequence or a dAb selected from the group consisting of SEQ ID NO:3 through SEQ ID NO:7.

[0147] In other embodiments, the protease resistant dAb competes for binding to IL-1R1 with an anti-IL-1R1 dAb, wherein the anti-IL-1R1 dAb comprises the amino acid sequence DOM4-130-54 (SEQ ID NO: 7) or an amino acid sequence that is at least about 80%, at least about 85%, at least about 90%, at least about 91%, at least about 92%, at least about 93%, at least about 94%, at least about 95%, at least about 96%, at least about 97%, at least about 98%, or at least about 99% homologous to DOM4-130-54 (SEQ ID NO:7).

### Ligand Formats

[0148] Ligands and dAb monomers can be formatted as mono or multispecific antibodies or antibody fragments or into mono or multispecific non-antibody structures. Suitable formats include, any suitable polypeptide structure in which an antibody variable domain or one or more of the CDRs thereof can be incorporated so as to confer binding specificity for antigen on the structure. A variety of suitable antibody formats are known in the art, such as, IgG-like formats, chimeric antibodies, humanized antibodies, human antibodies, single chain antibodies, bispecific antibodies, antibody heavy chains, antibody light chains, homodimers and heterodimers of antibody heavy chains and/or light chains, antigen-binding fragments of any of the foregoing (e.g., a Fv fragment (e.g. single chain Fv (scFv), a disulfide bonded Fv), a Fab fragment, a Fab′ fragment, a F(ab′)₂ fragment), a single variable domain (e.g., V_{H}, V_{L}, V_{HH}), a dAb, and modified versions of any of the foregoing (e.g., modified by the covalent attachment of polyalkylene glycol (e.g., polyethylene glycol, polypropylene glycol, polybutylene glycol) or other suitable polymer). See, PCT/GB03/002804, filed Jun. 30, 2003, which designated the United States, (WO 2004/081026) regarding PEGylated single variable domains and dabs, suitable methods for preparing same, increased in vivo half life of the PEGylated single variable domains and dAb monomers and multimers, suitable PEGs, preferred hydrodynamic sizes of PEGs, and preferred hydrodynamic sizes of PEGylated single variable domains and dAb monomers and multimers. The entire teaching of PCT/GB03/002804 (WO 2004/081026), including the portions referred to above, are incorporated herein by reference.

[0149] The ligand can be formatted as a dimer, trimer or polymer of a desired dAb monomer, for example using a suitable linker such as (Gly₄Ser)ₙ, where n=from 1 to 8, e.g., 2, 3, 4, 5, 6 or 7. If desired, ligands, including dAb monomers, dimers and trimers, can be linked to an antibody Fc region, comprising one or both of C_{H}2 and C_{H}3 domains, and optionally a hinge region. For example, vectors encoding ligands linked as a single nucleotide sequence to an Fc region may be used to prepare such polypeptides.

[0150] Ligands and dAb monomers can also be combined and/or formatted into non-antibody multi-ligand structures to form multivalent complexes, which bind target molecules, thereby providing superior avidity. For example natural bacterial receptors such as SpA can been used as scaffolds for the grafting of CDRs to generate ligands which bind specifically to one or more epitopes. Details of this procedure are described in U.S. Pat. No. 5,831,012. Other suitable scaffolds include those based on fibronectin and affibodies. Details of suitable procedures are described in WO 98/58965. Other suitable scaffolds include lipocallin and CTLA4, as described in van den Beuken et al., J. Mol. Biol. 310:591-601 (2001), and scaffolds such as those described in WO 00/69907 (Medical Research Council), which are based for example on the ring structure of bacterial GroEL or other chaperone polypeptides. Protein scaffolds may be combined; for example, CDRs may be grafted on to a CTLA4 scaffold and used together with immunoglobulin V_{H} or V_{L} domains to form a ligand. Likewise, fibronectin, lipocallin and other scaffolds may be combined.

[0151] A variety of suitable methods for preparing any desired format are known in the art. For example, antibody chains and formats (e.g., IgG-like formats, chimeric antibodies, humanized antibodies, human antibodies, single chain antibodies, bispecific antibodies, antibody heavy chains, antibody light chains, homodimers and heterodimers of antibody heavy chains and/or light chains) can be prepared by expression of suitable expression constructs and/or culture of suitable cells (e.g., hybridomas, heterohybridomas, recombinant host cells containing recombinant constructs encoding the format). Further, formats such as antigen-binding fragments of antibodies or antibody chains (e.g., a Fv fragment (e.g., single chain Fv (scFv), a disulfide bonded Fv), a Fab fragment, a Fab′ fragment, a F(ab′)₂ fragment), can be prepared by expression of suitable expression constructs or by enzymatic digestion of antibodies, for example using papain or pepsin.

[0152] The ligand can be formatted as a dual specific ligand or a multispecific ligand, for example as described in WO 03/002609, the entire teachings of which are incorporated herein by reference. The dual specific ligands comprise immunoglobulin single variable domains that have different binding specificities. Such dual specific ligands can comprise combinations of heavy and light chain domains. For example, the dual specific ligand may comprise a V_{H} domain and a V_{L} domain, which may be linked together in the form of an scFv (e.g., using a suitable linker such as Gly₄Ser), or formatted into a bispecific antibody or antigen-binding fragment thereof (e.g., F(ab′)₂ fragment). The dual specific ligands do not comprise complementary V_{H}/V_{L} pairs which form a conventional two chain antibody antigen-binding site that binds antigen or epitope co-operatively. Instead, the dual format ligands comprise a V_{H}/V_{L} complementary pair, wherein the V domains have different binding specificities.

[0153] In addition, the dual specific ligands may comprise one or more C_{H} or C_{L} domains if desired. A hinge region domain may also be included if desired. Such combinations of domains may, for example, mimic natural antibodies, such as IgG or IgM, or fragments thereof, such as Fv, scFv, Fab or F(ab′)₂ molecules. Other structures, such as a single arm of an IgG molecule comprising V_{H}, V_{L}, C_{H}1 and C_{L} domains, are envisaged. Preferably, the dual specific ligand of the invention comprises only two variable domains although several such ligands may be incorporated together into the same protein, for example two such ligands can be incorporated into an IgG or a multimeric immunoglobulin, such as IgM. Alternatively, in another embodiment a plurality of dual specific ligands are combined to form a multimer. For example, two different dual specific ligands are combined to create a tetra-specific molecule. It will be appreciated by one skilled in the art that the light and heavy variable regions of a dual-specific ligand produced according to the method of the present invention may be on the same polypeptide chain, or alternatively, on different polypeptide chains. In the case that the variable regions are on different polypeptide chains, then they may be linked via a linker, generally a flexible linker (such as a polypeptide chain), a chemical linking group, or any other method known in the art.

[0154] The multispecific ligand possesses more than one epitope binding specificity. Generally, the multi-specific ligand comprises two or more epitope binding domains, such dAbs or non-antibody protein domain comprising a binding site for an epitope, e.g., an affibody, an SpA domain, an LDL receptor class A domain, an EGF domain, an avimer. Multispecific ligands can be formatted further as described herein.

[0155] In some embodiments, the ligand is an IgG-like format. Such formats have the conventional four chain structure of an IgG molecule (2 heavy chains and two light chains), in which one or more of the variable regions (V_{H} and or V_{L}) have been replaced with a dAb or single variable domain of a desired specificity. Preferably, each of the variable regions (2 V_{H} regions and 2 V_{L} regions) is replaced with a dAb or single variable domain. The dAb(s) or single variable domain(s) that are included in an IgG-like format can have the same specificity or different specificities. In some embodiments, the IgG-like format is tetravalent and can have one, two, three or four specificities. For example, the IgG-like format can be monospecific and comprises 4 dabs that have the same specificity; bispecific and comprises 3 dAbs that have the same specificity and another dAb that has a different specificity; bispecific and comprise two dAbs that have the same specificity and two dAbs that have a common but different specificity; trispecific and comprises first and second dAbs that have the same specificity, a third dAb with a different specificity and a fourth dAb with a different specificity from the first, second and third dAbs; or tetraspecific and comprise four dAbs that each have a different specificity. Antigen-binding fragments of IgG-like formats (e.g., Fab, F(ab′)₂, Fab′, Fv, scFv) can be prepared. Preferably, the IgG-like formats or antigen-binding fragments thereof do not crosslink TNFR1.

### Half-Life Extended Formats

[0156] The ligand, such as a dAb monomers, can be formatted to extend its in vivo serum half life. Increased in vivo half-life is useful in in vivo applications of immunoglobulins, especially antibodies and most especially antibody fragments of small size such as dAbs. Such fragments (Fvs, disulphide bonded Fvs, Fabs, scFvs, dabs) are rapidly cleared from the body, which can limit clinical applications.

[0157] Small ligands, such as a dAb monomer, can be formatted as a larger antigen-binding fragment of an antibody or as an antibody (e.g., formatted as a Fab, Fab′, F(ab)₂, F(ab′)₂, IgG, scFv). A ligand (e.g., dAb monomer) can be formatted as a larger antigen-binding fragment of an antibody or as an antibody (e.g., formatted as a Fab, Fab′, F(ab)₂, F(ab′)₂, IgG, scFv) that has a larger hydrodynamic size. Ligands can also be formatted to have a larger hydrodynamic size, for example, by attachment of a polyalkyleneglycol group (e.g., polyethyleneglycol (PEG) group, polypropylene glycol, polybutylene glycol), serum albumin, transferrin, transferrin receptor or at least the transferrin-binding portion thereof, an antibody Fc region, or by conjugation to an antibody domain. In some embodiments, the ligand (e.g., dAb monomer) is PEGylated. Preferably the PEGylated ligand (e.g., dAb monomer) binds IL-1R1 with substantially the same affinity as the same ligand that is not PEGylated. For example, the ligand can be a PEGylated dAb monomer that binds IL-1R1, wherein the PEGylated dAb monomer binds IL-1R1 with an affinity that differs from the affinity of dAb in unPEGylated form by no more than a factor of about 1000, preferably no more than a factor of about 100, more preferably no more than a factor of about 10, or with substantially unchanged affinity relative to the unPEGylated form. See, PCT/GB03/002804, filed Jun. 30, 2003, which designated the United States, (WO 2004/081026) regarding PEGylation of single variable domains and dAbs, suitable methods for preparing same, increased in vivo half life of the PEGylated single variable domains and dAb monomers and multimers, suitable PEGs, preferred hydrodynamic sizes of PEGs, and preferred hydrodynamic sizes of PEGylated single variable domains and dAb monomers and multimers. The entire teaching of PCT/GB03/002804 (WO 2004/081026), including the portions referred to above, are incorporated herein by reference.

[0158] Hydrodynamic size of the ligands (e.g., dAb monomers and multimers) of the invention may be determined using methods which are well known in the art. For example, gel filtration chromatography may be used to determine the hydrodynamic size of a ligand. Suitable gel filtration matrices for determining the hydrodynamic sizes of ligands, such as cross-linked agarose matrices, are well known and readily available.

[0159] The size of a ligand format (e.g., the size of a PEG moiety attached to a dAb monomer), can be varied depending on the desired application. For example, where ligand is intended to leave the circulation and enter into peripheral tissues, it is desirable to keep the hydrodynamic size of the ligand low to facilitate extravazation from the blood stream. Alternatively, where it is desired to have the ligand remain in the systemic circulation for a longer period of time the size of the ligand can be increased, for example by formatting as and Ig like protein or by addition of a 30 to 60 kDa PEG moiety (e.g., linear or branched PEG 30 to 40 kDa PEG, such as addition of two 20 kDa PEG moieties.)

[0160] The hydrodynamic size of a ligand (e.g., dAb monomer) and its serum half-life can also be increased by conjugating or linking the ligand to a binding domain (e.g., antibody or antibody fragment) that binds an antigen or epitope that increases half-life in vivo, as described herein. For example, the ligand (e.g., dAb monomer) can be conjugated or linked to an anti-serum albumin or anti-neonatal Fc receptor antibody or antibody fragment, eg an anti-SA or anti-neonatal Fc receptor dAb, Fab, Fab′ or scFv, or to an anti-SA affibody or anti-neonatal Fc receptor affibody.

[0161] Examples of suitable albumin, albumin fragments or albumin variants for use in a ligand according to the invention are described in WO 2005/077042A2, which is incorporated herein by reference in its entirety. In particular, the following albumin, albumin fragments or albumin variants can be used in the present invention:
[0162] SEQ ID NO:1 (as disclosed in WO 2005/077042A2, this sequence being explicitly incorporated into the present disclosure by reference);
[0163] Albumin fragment or variant comprising or consisting of amino acids 1-387 of SEQ ID NO:1 in WO 2005/077042A2;
[0164] Albumin, or fragment or variant thereof, comprising an amino acid sequence selected from the group consisting of: (a) amino acids 54 to 61 of SEQ ID NO:1 in WO 2005/077042A2; (b) amino acids 76 to 89 of SEQ ID NO:1 in WO 2005/077042A2; (c) amino acids 92 to 100 of SEQ ID NO:1 in WO 2005/077042A2; (d) amino acids 170 to 176 of SEQ ID NO:1 in WO 2005/077042A2; (e) amino acids 247 to 252 of SEQ ID NO:1 in WO 2005/077042A2; (f) amino acids 266 to 277 of SEQ ID NO:1 in WO 2005/077042A2; (g) amino acids 280 to 288 of SEQ ID NO:1 in WO 2005/077042A2; (h) amino acids 362 to 368 of SEQ ID NO:1 in WO 2005/077042A2; (i) amino acids 439 to 447 of SEQ ID NO:1 in WO 2005/077042A2; (j) amino acids 462 to 475 of SEQ ID NO:1 in WO 2005/077042A2; (k) amino acids 478 to 486 of SEQ ID NO:1 in WO 2005/077042A2; and (l) amino acids 560 to 566 of SEQ ID NO:1 in WO 2005/077042A2.

[0165] Further examples of suitable albumin, fragments and analogs for use in a ligand according to the invention are described in WO 03/076567A2, which is incorporated herein by reference in its entirety. In particular, the following albumin, fragments or variants can be used in the present invention:
[0166] Human serum albumin as described in WO 03/076567A2, eg, in FIG. 3 (this sequence information being explicitly incorporated into the present disclosure by reference);
[0167] Human serum albumin (HA) consisting of a single non-glycosylated polypeptide chain of 585 amino acids with a formula molecular weight of 66,500 (See, Meloun, et al., FEBS Letters 58:136 (1975); Behrens, et al., Fed. Proc. 34:591 (1975); Lawn, et al., Nucleic Acids Research 9:6102-6114 (1981); Minghetti, et al., J. Biol. Chem. 261:6747 (1986));
[0168] A polymorphic variant or analog or fragment of albumin as described in Weitkamp, et al., Ann. Hum. Genet. 37:219 (1973);
[0169] An albumin fragment or variant as described in EP 322094, eg, HA(1-373, HA(1-388), HA(1-389), HA(1-369), and HA(1-419) and fragments between 1-369 and 1-419;
[0170] An albumin fragment or variant as described in EP 399666, eg, HA(1-177) and HA(1-200) and fragments between HA(1-X), where X is any number from 178 to 199.

[0171] Where a (one or more) half-life extending moiety (eg, albumin, transferrin and fragments and analogues thereof) is used in the ligands of the invention, it can be conjugated using any suitable method, such as, by direct fusion to the IL-1R1-binding moiety (eg, anti-IL-1R1 dAb or antibody fragment), for example by using a single nucleotide construct that encodes a fusion protein, wherein the fusion protein is encoded as a single polypeptide chain with the half-life extending moiety located N- or C-terminally to the IL-1R1 binding moiety. Alternatively, conjugation can be achieved by using a peptide linker between moieties, eg, a peptide linker as described in WO 03/076567A2 or WO 2004/003019 (these linker disclosures being incorporated by reference in the present disclosure to provide examples for use in the present invention).

[0172] Typically, a polypeptide that enhances serum half-life in vivo is a polypeptide which occurs naturally in vivo and which resists degradation or removal by endogenous mechanisms which remove unwanted material from the organism (e.g., human). For example, a polypeptide that enhances serum half-life in vivo can be selected from proteins from the extracellular matrix, proteins found in blood, proteins found at the blood brain barrier or in neural tissue, proteins localized to the kidney, liver, lung, heart, skin or bone, stress proteins, disease-specific proteins, or proteins involved in Fc transport.

[0173] Suitable polypeptides that enhance serum half-life in vivo include, for example, transferrin receptor specific ligand-neuropharmaceutical agent fusion proteins (see U.S. Pat. No. 5,977,307, the teachings of which are incorporated herein by reference), brain capillary endothelial cell receptor, transferrin, transferrin receptor (e.g., soluble transferrin receptor), insulin, insulin-like growth factor 1 (IGF 1) receptor, insulin-like growth factor 2 (IGF 2) receptor, insulin receptor, blood coagulation factor X, α1-antitrypsin and HNF 1α. Suitable polypeptides that enhance serum half-life also include alpha-1 glycoprotein (orosomucoid; AAG), alpha-1 antichymotrypsin (ACT), alpha-1 microglobulin (protein HC; AIM), antithrombin III (AT III), apolipoprotein A-1 (Apo A-1), apolipoprotein B (Apo B), ceruloplasmin (Cp), complement component C3 (C3), complement component C4 (C4), C1 esterase inhibitor (C1 INH), C-reactive protein (CRP), ferritin (FER), hemopexin (HPX), lipoprotein(a) (Lp(a)), mannose-binding protein (MBP), myoglobin (Myo), prealbumin (transthyretin; PAL), retinol-binding protein (RBP), and rheumatoid factor (RF).

[0174] Suitable proteins from the extracellular matrix include, for example, collagens, laminins, integrins and fibronectin. Collagens are the major proteins of the extracellular matrix. About 15 types of collagen molecules are currently known, found in different parts of the body, e.g., type I collagen (accounting for 90% of body collagen) found in bone, skin, tendon, ligaments, cornea, internal organs or type II collagen found in cartilage, vertebral disc, notochord, and vitreous humor of the eye.

[0175] Suitable proteins from the blood include, for example, plasma proteins (e.g., fibrin, α-2 macroglobulin, serum albumin, fibrinogen (e.g., fibrinogen A, fibrinogen B), serum amyloid protein A, haptoglobin, profilin, ubiquitin, uteroglobulin and β-2-microglobulin), enzymes and enzyme inhibitors (e.g., plasminogen, lysozyme, cystatin C, alpha-1-antitrypsin and pancreatic trypsin inhibitor), proteins of the immune system, such as immunoglobulin proteins (e.g., IgA, IgD, IgE, IgG, IgM, immunoglobulin light chains (kappa/lambda)), transport proteins (e.g., retinol binding protein, α-1 microglobulin), defensins (e.g. beta-defensin 1, neutrophil defensin 1, neutrophil defensin 2 and neutrophil defensin 3) and the like.

[0176] Suitable proteins found at the blood brain barrier or in neural tissue include, for example, melanocortin receptor, myelin, ascorbate transporter and the like.

[0177] Suitable polypeptides that enhances serum half-life in vivo also include proteins localized to the kidney (e.g., polycystin, type IV collagen, organic anion transporter K1, Heymann's antigen), proteins localized to the liver (e.g., alcohol dehydrogenase, G250), proteins localized to the lung (e.g., secretory component, which binds IgA), proteins localized to the heart (e.g., HSP 27, which is associated with dilated cardiomyopathy), proteins localized to the skin (e.g., keratin), bone specific proteins such as morphogenic proteins (BMPs), which are a subset of the transforming growth factor β superfamily of proteins that demonstrate osteogenic activity (e.g., BMP-2, BMP-4, BMP-5, BMP-6, BMP-7, BMP-8), tumor specific proteins (e.g., trophoblast antigen, herceptin receptor, oestrogen receptor, cathepsins (e.g., cathepsin B, which can be found in liver and spleen)).

[0178] Suitable disease-specific proteins include, for example, antigens expressed only on activated T-cells, including LAG-3 (lymphocyte activation gene), osteoprotegerin ligand (OPGL; see Nature 402, 304-309 (1999)), OX40 (a member of the TNF receptor family, expressed on activated T cells and specifically up-regulated in human T cell leukemia virus type-I (HTLV-I)-producing cells; see Immunol. 165 (1):263-70 (2000)). Suitable disease-specific proteins also include, for example, metalloproteases (associated with arthritis/cancers) including CG6512 Drosophila, human paraplegin, human FtsH, human AFG3L2, murine ftsH; and angiogenic growth factors, including acidic fibroblast growth factor (FGF-1), basic fibroblast growth factor (FGF-2), vascular endothelial growth factor/vascular permeability factor (VEGF/VPF), transforming growth factor-α (TGF α), tumor necrosis factor-alpha (TNF-α), angiogenin, interleukin-3 (IL-3), interleukin-8 (IL-8), platelet-derived endothelial growth factor (PD-ECGF), placental growth factor (P1GF), midkine platelet-derived growth factor-BB (PDGF), and fractalkine.

[0179] Suitable polypeptides that enhance serum half-life in vivo also include stress proteins such as heat shock proteins (HSPs). HSPs are normally found intracellularly. When they are found extracellularly, it is an indicator that a cell has died and spilled out its contents. This unprogrammed cell death (necrosis) occurs when as a result of trauma, disease or injury, extracellular HSPs trigger a response from the immune system. Binding to extracellular HSP can result in localizing the compositions of the invention to a disease site.

[0180] Suitable proteins involved in Fc transport include, for example, Brambell receptor (also known as FcRB). This Fc receptor has two functions, both of which are potentially useful for delivery. The functions are (1) transport of IgG from mother to child across the placenta (2) protection of IgG from degradation thereby prolonging its serum half-life. It is thought that the receptor recycles IgG from endosomes. (See, Holliger et al, Nat Biotechnol 15(7):632-6 (1997).)

[0181] Methods for pharmacokinetic analysis and determination of ligand half-life will be familiar to those skilled in the art. Details may be found in Kenneth, A et al: Chemical Stability of Pharmaceuticals: A Handbook for Pharmacists and in Peters et al, Pharmacokinetc analysis: A Practical Approach (1996). Reference is also made to “Pharmacokinetics”, M Gibaldi & D Perron, published by Marcel Dekker, 2^{nd} Rev. ex edition (1982), which describes pharmacokinetic parameters such as t alpha and t beta half lives and area under the curve (AUC).

### Nucleic Acid Molecules, Vectors and Host Cells

[0182] The invention also provides isolated and/or recombinant nucleic acid molecules that encode the anti-IL-1R1 ligands and dAb monomers described herein, including dual specific ligands (e.g., ligands that bind IL-1R1 and serum albumin; ligands that bind IL-1R1 and TNFR1) and multispecific ligands (e.g., ligands that bind IL-1R1, serum albumin and TNFR1). The invention also provides isolated and/or recombinant nucleic acid molecules that encode a protease (e.g., (e.g., pepsin, trypsin, elastase, chymotrypsin, carboxypeptidase, cathepsin (e.g., cathepsin G) and proteinase 3) resistant dAb monomer or a ligand that comprises a protease resistant dAb monomer as described herein.

[0183] In certain embodiments, the isolated and/or recombinant nucleic acid comprises a nucleotide sequence that encodes a domain antibody (dAb) that specifically binds IL-1R, inhibits binding of IL-1 (e.g., IL-1α and/or IL-1β) and IL-1ra to IL-1R1, and comprises an amino acid sequence that is at least about 80%, at least about 85%, at least about 90%, at least about 91%, at least about 92%, at least about 93%, at least about 94%, at least about 95%, at least about 96%, at least about 97%, at least about 98%, or at least about 99% homologous to the amino acid sequence or a dAb selected from the group consisting of DOM4-130-30 (SEQ ID NO:3), DOM4-130-46 (SEQ ID NO:4), DOM4-130-51 (SEQ ID NO:5), DOM4-130-53 (SEQ ID NO:6), DOM4-130-54 (SEQ ID NO:7), DOM4-130 (SEQ ID NO:215), DOM4-130-1 (SEQ ID NO:216), DOM4-130-2 (SEQ ID NO:217), DOM4-130-3 (SEQ ID NO:218), DOM4-130-4 (SEQ ID NO:219), DOM4-130-5 (SEQ ID NO:220), DOM4-130-6 (SEQ ID NO:221), DOM4-130-7 (SEQ ID NO:222), DOM4-130-8 (SEQ ID NO:223), DOM4-130-9 (SEQ ID NO:224), DOM4-130-10 (SEQ ID NO:225), DOM4-130-11 (SEQ ID NO:226), DOM4-130-12 (SEQ ID NO:227), DOM4-130-13 (SEQ ID NO:228), DOM4-130-14 (SEQ ID NO:229), DOM4-130-15 (SEQ ID NO:230), DOM4-130-16 (SEQ ID NO:231), DOM4-130-17 (SEQ ID NO:232), DOM4-130-18 (SEQ ID NO:233), DOM4-130-19 (SEQ ID NO:234), DOM4-130-20 (SEQ ID NO:235), DOM4-130-21 (SEQ ID NO:236), DOM4-130-22 (SEQ ID NO:237), DOM4-130-23 (SEQ ID NO:238), DOM4-130-24 (SEQ ID NO:239), DOM4-130-25 (SEQ ID NO:240), DOM4-130-26 (SEQ ID NO:241), DOM4-130-27 (SEQ ID NO:242), DOM4-130-28 (SEQ ID NO:243), DOM4-130-31 (SEQ ID NO:244), DOM4-130-32 (SEQ ID NO:245), DOM4-130-33 (SEQ ID NO:246), DOM4-130-34 (SEQ ID NO:247), DOM4-130-35 (SEQ ID NO:248), DOM4-130-36 (SEQ ID NO:249), DOM4-130-37 (SEQ ID NO:250), DOM4-130-38 (SEQ ID NO:251), DOM4-130-39 (SEQ ID NO:252), DOM4-130-40 (SEQ ID NO:253), DOM4-130-41 (SEQ ID NO:254), DOM4-130-42 (SEQ ID NO:255), DOM4-130-43 (SEQ ID NO:256), DOM4-130-44 (SEQ ID NO:257), DOM4-130-45 (SEQ ID NO:258), DOM4-130-46 (SEQ ID NO:259), DOM4-130-47 (SEQ ID NO:260), DOM4-130-48 (SEQ ID NO:261), DOM4-130-49 (SEQ ID NO:262), DOM4-130-50 (SEQ ID NO:263), DOM4-130-51 (SEQ ID NO:264), DOM4-130-52 (SEQ ID NO:265), DOM4-130-53 (SEQ ID NO:266), DOM4-130-54 (SEQ ID NO:267), DOM4-130-55 (SEQ ID NO:268), DOM4-130-56 (SEQ ID NO:269), DOM4-130-57 (SEQ ID NO:270), DOM4-130-58 (SEQ ID NO:271), DOM4-130-59 (SEQ ID NO:272), DOM4-130-60 (SEQ ID NO:273), DOM4-130-61 (SEQ ID NO:274), DOM4-130-62 (SEQ ID NO:275), DOM4-130-63 (SEQ ID NO:276), DOM4-130-64 (SEQ ID NO:277), DOM4-130-65 (SEQ ID NO:278), DOM4-130-66 (SEQ ID NO:279), DOM4-130-67 (SEQ ID NO:280), DOM4-130-68 (SEQ ID NO:281), DOM4-130-69 (SEQ ID NO:282), DOM4-130-70 (SEQ ID NO:283), DOM4-130-71 (SEQ ID NO:284), DOM4-130-72 (SEQ ID NO:285), DOM4-130-73 (SEQ ID NO:286), DOM4-130-74 (SEQ ID NO:287), DOM4-130-75 (SEQ ID NO:288), DOM4-130-76 (SEQ ID NO:289), DOM4-130-77 (SEQ ID NO:290), DOM4-130-78 (SEQ ID NO:291), DOM4-130-79 (SEQ ID NO:292), DOM4-130-80 (SEQ ID NO:293), DOM4-130-81 (SEQ ID NO:294), DOM4-130-82 (SEQ ID NO:295), DOM4-130-83 (SEQ ID NO:296), DOM4-130-84 (SEQ ID NO:297), DOM4-130-85 (SEQ ID NO:298), DOM4-130-86 (SEQ ID NO:299), DOM4-130-87 (SEQ ID NO:300), DOM4-130-88 (SEQ ID NO:301), DOM4-130-89 (SEQ ID NO:302), DOM4-130-90 (SEQ ID NO:303), DOM4-130-91 (SEQ ID NO:304), DOM4-130-92 (SEQ ID NO:305), DOM4-130-93 (SEQ ID NO:306), DOM4-130-94 (SEQ ID NO:307), DOM4-130-95 (SEQ ID NO:308), DOM4-130-96 (SEQ ID NO:309), DOM4-130-97 (SEQ ID NO:310), DOM4-130-98 (SEQ ID NO:311), DOM4-130-99 (SEQ ID NO:312), DOM4-130-100 (SEQ ID NO:313), DOM4-130-101 (SEQ ID NO:314), DOM4-130-102 (SEQ ID NO:315), DOM4-130-103 (SEQ ID NO:316), DOM4-130-104 (SEQ ID NO:317), DOM4-130-105 (SEQ ID NO:318), DOM4-130-106 (SEQ ID NO:319), DOM4-130-107 (SEQ ID NO:320), DOM4-130-108 (SEQ ID NO:321), DOM4-130-109 (SEQ ID NO:322), DOM4-130-110 (SEQ ID NO:323), DOM4-130-111 (SEQ ID NO:324), DOM4-130-112 (SEQ ID NO:325), DOM4-130-113 (SEQ ID NO:326), DOM4-130-114 (SEQ ID NO:327), DOM4-130-115 (SEQ ID NO:328), DOM4-130-116 (SEQ ID NO:329), DOM4-130-117 (SEQ ID NO:330), DOM4-130-118 (SEQ ID NO:331), DOM4-130-119 (SEQ ID NO:332), DOM4-130-120 (SEQ ID NO:333), DOM4-130-121 (SEQ ID NO:334), DOM4-130-122 (SEQ ID NO:335), DOM4-130-123 (SEQ ID NO:336), DOM4-130-124 (SEQ ID NO:337), DOM4-130-125 (SEQ ID NO:338), DOM4-130-126 (SEQ ID NO:339), DOM4-130-127 (SEQ ID NO:340), DOM4-130-128 (SEQ ID NO:341), DOM4-130-129 (SEQ ID NO:342), DOM4-130-130 (SEQ ID NO:343), DOM4-130-131 (SEQ ID NO:344), DOM4-130-132 (SEQ ID NO:345), and DOM4-130-133 (SEQ ID NO:346).

[0184] In certain embodiments, the isolated and/or recombinant nucleic acid comprises a nucleotide sequence that encodes a domain antibody (dAb) monomer that specifically binds IL-1R1 and inhibits binding of IL-1 to the receptor, wherein said nucleotide sequence has at least about 80%, at least about 85%, at least about 90%, at least about 91%, at least about 92%, at least about 93%, at least about 94%, at least about 95%, at least about 96%, at least about 97%, at least about 98%, or at least about 99% nucleotide sequence identity with a nucleotide sequence selected from the group consisting of DOM4-130-30 (SEQ ID NO:3), DOM4-130-46 (SEQ ID NO:4), DOM4-130-51 (SEQ ID NO:5), DOM4-130-53 (SEQ ID NO:6), DOM4-130-54 (SEQ ID NO:7), DOM4-130 (SEQ ID NO:215), DOM4-130-1 (SEQ ID NO:216), DOM4-130-2 (SEQ ID NO:217), DOM4-130-3 (SEQ ID NO:218), DOM4-130-4 (SEQ ID NO:219), DOM4-130-5 (SEQ ID NO:220), DOM4-130-6 (SEQ ID NO:221), DOM4-130-7 (SEQ ID NO:222), DOM4-130-8 (SEQ ID NO:223), DOM4-130-9 (SEQ ID NO:224), DOM4-130-10 (SEQ ID NO:225), DOM4-130-11 (SEQ ID NO:226), DOM4-130-12 (SEQ ID NO:227), DOM4-130-13 (SEQ ID NO:228), DOM4-130-14 (SEQ ID NO:229), DOM4-130-15 (SEQ ID NO:230), DOM4-130-16 (SEQ ID NO:231), DOM4-130-17 (SEQ ID NO:232), DOM4-130-18 (SEQ ID NO:233), DOM4-130-19 (SEQ ID NO:234), DOM4-130-20 (SEQ ID NO:235), DOM4-130-21 (SEQ ID NO:236), DOM4-130-22 (SEQ ID NO:237), DOM4-130-23 (SEQ ID NO:238), DOM4-130-24 (SEQ ID NO:239), DOM4-130-25 (SEQ ID NO:240), DOM4-130-26 (SEQ ID NO:241), DOM4-130-27 (SEQ ID NO:242), DOM4-130-28 (SEQ ID NO:243), DOM4-130-31 (SEQ ID NO:244), DOM4-130-32 (SEQ ID NO:245), DOM4-130-33 (SEQ ID NO:246), DOM4-130-34 (SEQ ID NO:247), DOM4-130-35 (SEQ ID NO:248), DOM4-130-36 (SEQ ID NO:249), DOM4-130-37 (SEQ ID NO:250), DOM4-130-38 (SEQ ID NO:251), DOM4-130-39 (SEQ ID NO:252), DOM4-130-40 (SEQ ID NO:253), DOM4-130-41 (SEQ ID NO:254), DOM4-130-42 (SEQ ID NO:255), DOM4-130-43 (SEQ ID NO:256), DOM4-130-44 (SEQ ID NO:257), DOM4-130-45 (SEQ ID NO:258), DOM4-130-46 (SEQ ID NO:259), DOM4-130-47 (SEQ ID NO:260), DOM4-130-48 (SEQ ID NO:261), DOM4-130-49 (SEQ ID NO:262), DOM4-130-50 (SEQ ID NO:263), DOM4-130-51 (SEQ ID NO:264), DOM4-130-52 (SEQ ID NO:265), DOM4-130-53 (SEQ ID NO:266), DOM4-130-54 (SEQ ID NO:267), DOM4-130-55 (SEQ ID NO:268), DOM4-130-56 (SEQ ID NO:269), DOM4-130-57 (SEQ ID NO:270), DOM4-130-58 (SEQ ID NO:271), DOM4-130-59 (SEQ ID NO:272), DOM4-130-60 (SEQ ID NO:273), DOM4-130-61 (SEQ ID NO:274), DOM4-130-62 (SEQ ID NO:275), DOM4-130-63 (SEQ ID NO:276), DOM4-130-64 (SEQ ID NO:277), DOM4-130-65 (SEQ ID NO:278), DOM4-130-66 (SEQ ID NO:279), DOM4-136-67 (SEQ ID NO:280), DOM4-130-68 (SEQ ID NO:281), DOM4-130-69 (SEQ ID NO:282), DOM4-130-70 (SEQ ID NO:283), DOM4-130-71 (SEQ ID NO:284), DOM4-130-72 (SEQ ID NO:285), DOM4-130-73 (SEQ ID NO:286), DOM4-130-74 (SEQ ID NO:287), DOM4-130-75 (SEQ ID NO:288), DOM4-130-76 (SEQ ID NO:289), DOM4-130-77 (SEQ ID NO:290), DOM4-130-78 (SEQ ID NO:291), DOM4-130-79 (SEQ ID NO:292), DOM4-130-80 (SEQ ID NO:293), DOM4-130-81 (SEQ ID NO:294), DOM4-130-82 (SEQ ID NO:295), DOM4-130-83 (SEQ ID NO:296), DOM4-130-84 (SEQ ID NO:297), DOM4-130-85 (SEQ ID NO:298), DOM4-130-86 (SEQ ID NO:299), DOM4-130-87 (SEQ ID NO:300), DOM4-130-88 (SEQ ID NO:301), DOM4-130-89 (SEQ ID NO:302), DOM4-130-90 (SEQ ID NO:303), DOM4-130-91 (SEQ ID NO:304), DOM4-130-92 (SEQ ID NO:305), DOM4-130-93 (SEQ ID NO:306), DOM4-130-94 (SEQ ID NO:307), DOM4-130-95 (SEQ ID NO:308), DOM4-130-96 (SEQ ID NO:309), DOM4-130-97 (SEQ ID NO:310), DOM4-130-98 (SEQ ID NO:311), DOM4-130-99 (SEQ ID NO:312), DOM4-130-100 (SEQ ID NO:313), DOM4-130-101 (SEQ ID NO:314), DOM4-130-102 (SEQ ID NO:315), DOM4-130-103 (SEQ ID NO:316), DOM4-130-104 (SEQ ID NO:317), DOM4-130-105 (SEQ ID NO:318), DOM4-130-106 (SEQ ID NO:319), DOM4-130-107 (SEQ ID NO:320), DOM4-130-108 (SEQ ID NO:321), DOM4-130-109 (SEQ ID NO:322), DOM4-130-110 (SEQ ID NO:323), DOM4-130-111 (SEQ ID NO:324), DOM4-130-112 (SEQ ID NO:325), DOM4-130-113 (SEQ ID NO:326), DOM4-130-114 (SEQ ID NO:327), DOM4-130-115 (SEQ ID NO:328), DOM4-130-116 (SEQ ID NO:329), DOM4-130-117 (SEQ ID NO:330), DOM4-130-118 (SEQ ID NO:331), DOM4-130-119 (SEQ ID NO:332), DOM4-130-120 (SEQ ID NO:333), DOM4-130-121 (SEQ ID NO:334), DOM4-130-122 (SEQ ID NO:335), DOM4-130-123 (SEQ ID NO:336), DOM4-130-124 (SEQ ID NO:337), DOM4-130-125 (SEQ ID NO:338), DOM4-130-126 (SEQ ID NO:339), DOM4-130-127 (SEQ ID NO:340), DOM4-130-128 (SEQ ID NO:341), DOM4-130-129 (SEQ ID NO:342), DOM4-130-130 (SEQ ID NO:343), DOM4-130-131 (SEQ ID NO:344), DOM4-130-132 (SEQ ID NO:345), and DOM4-130-133 (SEQ ID NO:346).

[0185] In other embodiments, the isolated and/or recombinant nucleic acid comprises a nucleotide sequence that encodes a protease (e.g., (e.g., pepsin, trypsin, elastase, chymotrypsin, carboxypeptidase, cathepsin (e.g., cathepsin G) and proteinase 3) resistant dAb as described herein.

[0186] The invention also provides a vector comprising a recombinant nucleic acid molecule of the invention. In certain embodiments, the vector is an expression vector comprising one or more expression control elements or sequences that are operably linked to the recombinant nucleic acid of the invention The invention also provides a recombinant host cell comprising a recombinant nucleic acid molecule or vector of the invention. Suitable vectors (e.g., plasmids, phagmids), expression control elements, host cells and methods for producing recombinant host cells of the invention are well-known in the art, and examples are further described herein.

[0187] Suitable expression vectors can contain a number of components, for example, an origin of replication, a selectable marker gene, one or more expression control elements, such as a transcription control element (e.g., promoter, enhancer, terminator) and/or one or more translation signals, a signal sequence or leader sequence, and the like. Expression control elements and a signal sequence, if present, can be provided by the vector or other source. For example, the transcriptional and/or translational control sequences of a cloned nucleic acid encoding an antibody chain can be used to direct expression.

[0188] A promoter can be provided for expression in a desired host cell. Promoters can be constitutive or inducible. For example, a promoter can be operably linked to a nucleic acid encoding an antibody, antibody chain or portion thereof, such that it directs transcription of the nucleic acid. A variety of suitable promoters for procaryotic (e.g., lac, tac, T3, T7 promoters for E. coli) and eucaryotic (e.g., simian virus 40 early or late promoter, Rous sarcoma virus long terminal repeat promoter, cytomegalovirus promoter, adenovirus late promoter) hosts are available.

[0189] In addition, expression vectors typically comprise a selectable marker for selection of host cells carrying the vector, and, in the case of a replicable expression vector, an origin of replication. Genes encoding products which confer antibiotic or drug resistance are common selectable markers and may be used in procaryotic cells (e.g., lactamase gene (ampicillin resistance), Tet gene for tetracycline resistance) and eucaryotic cells (e.g., neomycin (G418 or geneticin), gpt (mycophenolic acid), ampicillin, or hygromycin resistance genes). Dihydrofolate reductase marker genes permit selection with methotrexate in a variety of hosts. Genes encoding the gene product of auxotrophic markers of the host (e.g., LEU2, URA3, HIS3) are often used as selectable markers in yeast. Use of viral (e.g., baculovirus) or phage vectors, and vectors which are capable of integrating into the genome of the host cell, such as retroviral vectors, are also contemplated. Suitable expression vectors for expression in mammalian cells and prokaryotic cells (E. coli), insect cells (Drosophila Schnieder S2 cells, Sf9) and yeast (P. methanolica, P. pastoris, S. cerevisiae) are well-known in the art.

[0190] Suitable host cells can be prokaryotic, including bacterial cells such as E. coli, B. subtilis and/or other suitable bacteria; eukaryotic cells, such as fungal or yeast cells (e.g., Pichia pastoris, Aspergillus sp., Saccharomyces cerevisiae, Schizosaccharomyces pombe, Neurospora crassa), or other lower eukaryotic cells, and cells of higher eukaryotes such as those from insects (e.g., Drosophila Schnieder S2 cells, Sf9 insect cells (WO 94/26087 (O'Connor)), mammals (e.g., COS cells, such as COS-1 (ATCC Accession No. CRL-1650) and COS-7 (ATCC Accession No. CRL-1651), CHO (e.g., ATCC Accession No. CRL-9096, CHO DG44 (Urlaub, G. and Chasin, L A., Proc. Natl. Acac. Sci. USA, 77(7):4216-4220 (1980))), 293 (ATCC Accession No. CRL-1573), HeLa (ATCC Accession No. CCL-2), CV1 (ATCC Accession No. CCL-70), WOP (Dailey, L., et al., J. Virol., 54:739-749 (1985), 3T3, 293T (Pear, W. S., et al., Proc. Natl. Acad. Sci. U.S.A., 90:8392-8396 (1993)) NS0 cells, SP2/0, HuT 78 cells and the like, or plants (e.g., tobacco). (See, for example, Ausubel, F. M. et al., eds. Current Protocols in Molecular Biology, Greene Publishing Associates and John Wiley & Sons Inc. (1993).) In some embodiments, the host cell is an isolated host cell and is not part of a multicellular organism (e.g., plant or animal). In preferred embodiments, the host cell is a non-human host cell.

[0191] The invention also provides a method for producing a ligand (e.g., dAb monomer, dual-specific ligand, multispecific ligand) of the invention, comprising maintaining a recombinant host cell comprising a recombinant nucleic acid of the invention under conditions suitable for expression of the recombinant nucleic acid, whereby the recombinant nucleic acid is expressed and a ligand is produced. In some embodiments, the method further comprises isolating the ligand.

### Preparation of Immunoglobulin Based Ligands

[0192] Ligands (e.g., dual specific ligands, dAb monomers) according to the invention can be prepared according to previously established techniques, used in the field of antibody engineering, for the preparation of scFv, “phage” antibodies and other engineered antibody molecules. Techniques for the preparation of antibodies are for example described in the following reviews and the references cited therein: Winter & Milstein, (1991) Nature 349:293-299; Pluckthun (1992) Immunological Reviews 130:151-188; Wright et al., (1992) Crti. Rev. Immunol. 12:125-168; Holliger, P. & Winter, G. (1993) Curr. Op. Biotechn. 4, 446-449; Carter, et al. (1995) J. Hematother. 4, 463-470; Chester, K. A. & Hawkins, R. E. (1995) Trends Biotechn. 13, 294-300; Hoogenboom, H. R. (1997) Nature Biotechnol. 15, 125-126; Fearon, D. (1997) Nature Biotechnol. 15, 618-619; Plückthun, A. & Pack, P. (1997) Immunotechnology 3, 83-105; Carter, P. & Merchant, A. M. (1997) Curr. Opin. Biotechnol. 8, 449-454; Holliger, P. & Winter, G. (1997) Cancer Immunol. Immunother. 45, 128-130.

[0193] Suitable techniques employed for selection of antibody variable domains with a desired specificity employ libraries and selection procedures which are known in the art. Natural libraries (Marks et al. (1991) J. Mol. Biol., 222: 581; Vaughan et al. (1996) Nature Biotech., 14: 309) which use rearranged V genes harvested from human B cells are well known to those skilled in the art. Synthetic libraries (Hoogenboom & Winter (1992) J. Mol. Biol., 227: 381; Barbas et al. (1992) Proc. Natl. Acad. Sci. USA, 89: 4457; Nissim et al. (1994) EMBO J., 13: 692; Griffiths et al. (1994) EMBO J., 13: 3245; De Kruif et al. (1995) J. Mol. Biol., 248: 97) are prepared by cloning immunoglobulin V genes, usually using PCR. Errors in the PCR process can lead to a high degree of randomisation. V_{H} and/or V_{L} libraries may be selected against target antigens or epitopes separately, in which case single domain binding is directly selected for, or together.

### Library Vector Systems

[0194] A variety of selection systems are known in the art which are suitable for use in the present invention. Examples of such systems are described below.

[0195] Bacteriophage lambda expression systems may be screened directly as bacteriophage plaques or as colonies of lysogens, both as previously described (Huse et al. (1989) Science, 246: 1275; Caton and Koprowski (1990) Proc. Natl. Acad. Sci. U.S.A., 87; Mullinax et al. (1990) Proc. Natl. Acad. Sci. U.S.A., 87: 8095; Persson et al. (1991) Proc. Natl. Acad. Sci. U.S.A., 88: 2432) and are of use in the invention. While such expression systems can be used to screen up to 10⁶ different members of a library, they are not really suited to screening of larger numbers (greater than 10⁶ members). Of particular use in the construction of libraries are selection display systems, which enable a nucleic acid to be linked to the polypeptide it expresses. As used herein, a selection display system is a system that permits the selection, by suitable display means, of the individual members of the library by binding the generic and/or target ligands.

[0196] Selection protocols for isolating desired members of large libraries are known in the art, as typified by phage display techniques. Such systems, in which diverse peptide sequences are displayed on the surface of filamentous bacteriophage (Scott and Smith (1990) Science, 249: 386), have proven useful for creating libraries of antibody fragments (and the nucleotide sequences that encoding them) for the in vitro selection and amplification of specific antibody fragments that bind a target antigen (McCafferty et al., WO 92/01047). The nucleotide sequences encoding the variable regions are linked to gene fragments which encode leader signals that direct them to the periplasmic space of E. coli and as a result the resultant antibody fragments are displayed on the surface of the bacteriophage, typically as fusions to bacteriophage coat proteins (e.g., pIII or pVIII). Alternatively, antibody fragments are displayed externally on lambda phage capsids (phagebodies). An advantage of phage-based display systems is that, because they are biological systems, selected library members can be amplified simply by growing the phage containing the selected library member in bacterial cells. Furthermore, since the nucleotide sequence that encode the polypeptide library member is contained on a phage or phagemid vector, sequencing, expression and subsequent genetic manipulation is relatively straightforward.

[0197] Methods for the construction of bacteriophage antibody display libraries and lambda phage expression libraries are well known in the art (McCafferty et al. (1990) Nature, 348: 552; Kang et al. (1991) Proc. Natl. Acad. Sci. U.S.A., 88: 4363; Clackson et al. (1991) Nature, 352: 624; Lowman et al. (1991) Biochemistry, 30: 10832; Burton et al. (1991) Proc. Natl. Acad. Sci. U.S.A., 88: 10134; Hoogenboom et al. (1991) Nucleic Acids Res., 19: 4133; Chang et al. (1991) J. Immunol., 147: 3610; Breitling et al. (1991) Gene, 104: 147; Marks et al. (1991) supra; Barbas et al. (1992) supra; Hawkins and Winter (1992) J. Immunol., 22: 867; Marks et al., 1992, J. Biol. Chem., 267: 16007; Lerner et al. (1992) Science, 258: 1313, incorporated herein by reference).

[0198] One particularly advantageous approach has been the use of scFv phage-libraries (Huston et al., 1988, Proc. Natl. Acad. Sci. U.S.A., 85: 5879-5883; Chaudhary et al. (1990) Proc. Natl. Acad. Sci. U.S.A., 87: 1066-1070; McCafferty et al. (1990) supra; Clackson et al. (1991) Nature, 352: 624; Marks et al. (1991) J. Mol. Biol., 222: 581; Chiswell et al. (1992) Trends Biotech., 10: 80; Marks et al. (1992) J. Biol. Chem., 267). Various embodiments of scFv libraries displayed on bacteriophage coat proteins have been described. Refinements of phage display approaches are also known, for example as described in WO96/06213 and WO92/01047 (Medical Research Council et al.) and WO97/08320 (Morphosys), which are incorporated herein by reference.

[0199] Other systems for generating libraries of polypeptides involve the use of cell-free enzymatic machinery for the in vitro synthesis of the library members. In one method, RNA molecules are selected by alternate rounds of selection against a target ligand and PCR amplification (Tuerk and Gold (1990) Science, 249: 505; Ellington and Szostak (1990) Nature, 346: 818). A similar technique may be used to identify DNA sequences which bind a predetermined human transcription factor (Thiesen and Bach (1990) Nucleic Acids Res., 18: 3203; Beaudry and Joyce (1992) Science, 257: 635; WO92/05258 and WO92/14843). In a similar way, in vitro translation can be used to synthesise polypeptides as a method for generating large libraries. These methods which generally comprise stabilised polysome complexes, are described further in WO88/08453, WO90/05785, WO90/07003, WO91/02076, WO91/05058, and WO92/02536. Alternative display systems which are not phage-based, such as those disclosed in WO95/22625 and WO95/11922 (Affymax) use the polysomes to display polypeptides for selection.

[0200] A still further category of techniques involves the selection of repertoires in artificial compartments, which allow the linkage of a gene with its gene product. For example, a selection system in which nucleic acids encoding desirable gene products may be selected in microcapsules formed by water-in-oil emulsions is described in WO99/02671, WO00/40712 and Tawfik & Griffiths (1998) Nature Biotechnol 16(7), 652-6. Genetic elements encoding a gene product having a desired activity are compartmentalised into microcapsules and then transcribed and/or translated to produce their respective gene products (RNA or protein) within the microcapsules. Genetic elements which produce gene product having desired activity are subsequently sorted. This approach selects gene products of interest by detecting the desired activity by a variety of means.

### Library Construction

[0201] Libraries intended for selection, may be constructed using techniques known in the art, for example as set forth above, or may be purchased from commercial sources. Libraries which are useful in the present invention are described, for example, in WO99/20749. Once a vector system is chosen and one or more nucleic acid sequences encoding polypeptides of interest are cloned into the library vector, one may generate diversity within the cloned molecules by undertaking mutagenesis prior to expression; alternatively, the encoded proteins may be expressed and selected, as described above, before mutagenesis and additional rounds of selection are performed. Mutagenesis of nucleic acid sequences encoding structurally optimised polypeptides is carried out by standard molecular methods. Of particular use is the polymerase chain reaction, or PCR, (Mullis and Faloona (1987) Methods Enzymol., 155: 335, herein incorporated by reference). PCR, which uses multiple cycles of DNA replication catalysed by a thermostable, DNA-dependent DNA polymerase to amplify the target sequence of interest, is well known in the art. The construction of various antibody libraries has been discussed in Winter et al. (1994) Ann. Rev. Immunology 12, 433-55, and references cited therein.

[0202] PCR is performed using template DNA (at least 1 fg; more usefully, 1-1000 ng) and at least 25 pmol of oligonucleotide primers; it may be advantageous to use a larger amount of primer when the primer pool is heavily heterogeneous, as each sequence is represented by only a small fraction of the molecules of the pool, and amounts become limiting in the later amplification cycles. A typical reaction mixture includes: 211 of DNA, 25 pmol of oligonucleotide primer, 2.5 μl of 10×PCR buffer 1 (Perkin-Elmer, Foster City, Calif.), 0.4 μl of 1.25 μM dNTP, 0.15 μl (or 2.5 units) of Taq DNA polymerase (Perkin Elmer, Foster City, Calif.) and deionized water to a total volume of 25 μl. Mineral oil is overlaid and the PCR is performed using a programmable thermal cycler. The length and temperature of each step of a PCR cycle, as well as the number of cycles, is adjusted in accordance to the stringency requirements in effect. Annealing temperature and timing are determined both by the efficiency with which a primer is expected to anneal to a template and the degree of mismatch that is to be tolerated; obviously, when nucleic acid molecules are simultaneously amplified and mutagenised, mismatch is required, at least in the first round of synthesis. The ability to optimise the stringency of primer annealing conditions is well within the knowledge of one of moderate skill in the art. An annealing temperature of between 30° C. and 72° C. is used. Initial denaturation of the template molecules normally occurs at between 92° C. and 99° C. for 4 minutes, followed by 20-40 cycles consisting of denaturation (94-99° C. for 15 seconds to 1 minute), annealing (temperature determined as discussed above; 1-2 minutes), and extension (72° C. for 1-5 minutes, depending on the length of the amplified product). Final extension is generally for 4 minutes at 72° C., and may be followed by an indefinite (0-24 hour) step at 4° C.

### Combining Single Variable Domains

[0203] Immunoglobulin variable domains useful in the invention, once selected, may be combined by a variety of methods known in the art, including covalent and non-covalent methods. Preferred methods include the use of polypeptide linkers, as described, for example, in connection with scFv molecules (Bird et al., (1988) Science 242:423-426). Discussion of suitable linkers is provided in Bird et al. Science 242, 423-426; Hudson et al, Journal Immunol Methods 231 (1999) 177-189; Hudson et al, Proc Nat Acad Sci USA 85, 5879-5883. Linkers are preferably flexible, allowing the two single domains to interact. One linker example is a (Gly₄ Ser)ₙ linker, where n=1 to 8, eg, 1, 2, 3, 4, 5, 6, 7 or 8. The linkers used in diabodies, which are less flexible, may also be employed (Holliger et al., (1993) Proc Nat Acad Sci (USA) 90:6444-6448). In one embodiment, the linker employed is not an immunoglobulin hinge region.

[0204] Variable domains may be combined using methods other than linkers. For example, the use of disulphide bridges, provided through naturally-occurring or engineered cysteine residues, may be exploited to stabilise V_{H}-V_{H}, V_{L}-V_{L} or V_{H}-V_{L} dimers (Reiter et al., (1994) Protein Eng. 7:697-704) or by remodelling the interface between the variable domains to improve the “fit” and thus the stability of interaction (Ridgeway et al., (1996) Protein Eng. 7:617-621; Zhu et al., (1997) Protein Science 6:781-788). Other techniques for joining or stabilising variable domains of immunoglobulins, and in particular antibody V_{H} domains, may be employed as appropriate.

### Characterisation of Ligands

[0205] The binding of a ligand (e.g., dAb monomer, dual-specific ligand) to its specific antigen(s) or epitope(s) can be tested by methods which will be familiar to those skilled in the art and include ELISA. In a preferred embodiment of the invention binding is tested using monoclonal phage ELISA. Phage ELISA may be performed according to any suitable procedure: an exemplary protocol is set forth below.

[0206] Populations of phage produced at each round of selection can be screened for binding by ELISA to the selected antigen or epitope, to identify “polyclonal” phage antibodies. Phage from single infected bacterial colonies from these populations can then be screened by ELISA to identify “monoclonal” phage antibodies. It is also desirable to screen soluble antibody fragments for binding to antigen or epitope, and this can also be undertaken by ELISA using reagents, for example, against a C- or N-terminal tag (see for example Winter et al. (1994) Ann. Rev. Immunology 12, 433-55 and references cited therein.

[0207] The diversity of the selected phage monoclonal antibodies may also be assessed by gel electrophoresis of PCR products (Marks et al. 1991, supra; Nissim et al. 1994 supra), probing (Tomlinson et al., 1992) J. Mol. Biol. 227, 776) or by sequencing of the vector DNA.

### Structure of Ligands

[0208] In the case that the immunoglobulin variable domains are selected from V-gene repertoires for instance using phage display technology as herein described, then these variable domains comprise a universal framework region, such that they may be recognised by a specific generic ligand as herein defined. The use of universal frameworks, generic ligands and the like is described in WO99/20749.

[0209] Where V-gene repertoires are used variation in polypeptide sequence is preferably located within the structural loops of the variable domains. The polypeptide sequences of either variable domain may be altered by DNA shuffling or by mutation in order to enhance the interaction of each variable domain with its complementary pair. DNA shuffling is known in the art and taught, for example, by Stemmer, 1994, Nature 370: 389-391 and U.S. Pat. No. 6,297,053, both of which are incorporated herein by reference. Other methods of mutagenesis are well known to those of skill in the art.

[0210] In general, nucleic acid molecules and vector constructs required for selection, preparation and formatting ligands may be constructed and manipulated as set forth in standard laboratory manuals, such as Sambrook et al. (1989) Molecular Cloning: A Laboratory Manual, Cold Spring Harbor, USA.

[0211] The manipulation of nucleic acids useful in the present invention is typically carried out in recombinant vectors. As used herein, vector refers to a discrete element that is used to introduce heterologous DNA into cells for the expression and/or replication thereof. Methods by which to select or construct and, subsequently, use such vectors are well known to one of ordinary skill in the art. Numerous vectors are publicly available, including bacterial plasmids, bacteriophage, artificial chromosomes and episomal vectors. Such vectors may be used for simple cloning and mutagenesis; alternatively gene expression vector is employed. A vector of use according to the invention may be selected to accommodate a polypeptide coding sequence of a desired size, typically from 0.25 kilobase (kb) to 40 kb or more in length. A suitable host cell is transformed with the vector after in vitro cloning manipulations. Each vector contains various functional components, which generally include a cloning (or “polylinker”) site, an origin of replication and at least one selectable marker gene. If a given vector is an expression vector, it additionally possesses one or more of the following: an enhancer element, promoter, transcription termination and signal sequences, each positioned in the vicinity of the cloning site, such that they are operatively linked to the gene encoding a ligand according to the invention.

[0212] Both cloning and expression vectors generally contain nucleic acid sequences that enable the vector to replicate in one or more selected host cells. Typically in cloning vectors, this sequence is one that enables the vector to replicate independently of the host chromosomal DNA and includes origins of replication or autonomously replicating sequences. Such sequences are well known for a variety of bacteria, yeast and viruses. The origin of replication from the plasmid pBR322 is suitable for most Gram-negative bacteria, the 2 micron plasmid origin is suitable for yeast, and various viral origins (e.g., SV 40, adenovirus) are useful for cloning vectors in mammalian cells. Generally, the origin of replication is not needed for mammalian expression vectors unless these are used in mammalian cells able to replicate high levels of DNA, such as COS cells.

[0213] Advantageously, a cloning or expression vector may contain a selection gene also referred to as selectable marker. This gene encodes a protein necessary for the survival or growth of transformed host cells grown in a selective culture medium. Host cells not transformed with the vector containing the selection gene will therefore not survive in the culture medium. Typical selection genes encode proteins that confer resistance to antibiotics and other toxins, e.g., ampicillin, neomycin, methotrexate or tetracycline, complement auxotrophic deficiencies, or supply critical nutrients not available in the growth media.

[0214] Since the replication of vectors encoding a ligand according to the present invention is most conveniently performed in E. coli, an E. coli-selectable marker, for example, the β-lactamase gene that confers resistance to the antibiotic ampicillin, is of use. These can be obtained from E. coli plasmids, such as pBR322 or a pUC plasmid such as pUC18 or pUC19.

[0215] Expression vectors usually contain a promoter that is recognised by the host organism and is operably linked to the coding sequence of interest. Such a promoter may be inducible or constitutive. The term “operably linked” refers to a juxtaposition wherein the components described are in a relationship permitting them to function in their intended manner. A control sequence “operably linked” to a coding sequence is ligated in such a way that expression of the coding sequence is achieved under conditions compatible with the control sequences.

[0216] Promoters suitable for use with prokaryotic hosts include, for example, the β-lactamase and lactose promoter systems, alkaline phosphatase, the tryptophan (trp) promoter system and hybrid promoters such as the tac promoter. Promoters for use in bacterial systems will also generally contain a Shine-Delgarno sequence operably linked to the coding sequence.

[0217] The preferred vectors are expression vectors that enable the expression of a nucleotide sequence corresponding to a polypeptide library member. Thus, selection with the first and/or second antigen or epitope can be performed by separate propagation and expression of a single clone expressing the polypeptide library member or by use of any selection display system. As described above, the preferred selection display system is bacteriophage display. Thus, phage or phagemid vectors may be used, eg pIT1 or pIT2. Leader sequences useful in the invention include pelB, stII, ompA, phoA, bla and pelA. One example are phagemid vectors which have an E. coli. origin of replication (for double stranded replication) and also a phage origin of replication (for production of single-stranded DNA). The manipulation and expression of such vectors is well known in the art (Hoogenboom and Winter (1992) supra; Nissim et al. (1994) supra). Briefly, the vector contains a β-lactamase gene to confer selectivity on the phagemid and a lac promoter upstream of an expression cassette that consists (N to C terminal) of a pelB leader sequence (which directs the expressed polypeptide to the periplasmic space), a multiple cloning site (for cloning the nucleotide version of the library member), optionally, one or more peptide tag (for detection), optionally, one or more TAG stop codon and the phage protein pIII. Thus, using various suppressor and non-suppressor strains of E. coli and with the addition of glucose, iso-propyl thio-β-D-galactoside (IPTG) or a helper phage, such as VCS M13, the vector is able to replicate as a plasmid with no expression, produce large quantities of the polypeptide library member only or produce phage, some of which contain at least one copy of the polypeptide-pIII fusion on their surface.

[0218] Construction of vectors encoding ligands according to the invention employs conventional ligation techniques. Isolated vectors or DNA fragments are cleaved, tailored, and religated in the form desired to generate the required vector. If desired, analysis to confirm that the correct sequences are present in the constructed vector can be performed in a known fashion. Suitable methods for constructing expression vectors, preparing in vitro transcripts, introducing DNA into host cells, and performing analyses for assessing expression and function are known to those skilled in the art. The presence of a gene sequence in a sample is detected, or its amplification and/or expression quantified by conventional methods, such as Southern or Northern analysis, Western blotting, dot blotting of DNA, RNA or protein, in situ hybridisation, immunocytochemistry or sequence analysis of nucleic acid or protein molecules. Those skilled in the art will readily envisage how these methods may be modified, if desired.

### Skeletons

[0219] Skeletons may be based on immunoglobulin molecules or may be non-immunoglobulin in origin as set forth above. Preferred immunoglobulin skeletons as herein defined includes any one or more of those selected from the following: an immunoglobulin molecule comprising at least (i) the CL (kappa or lambda subclass) domain of an antibody; or (ii) the CH1 domain of an antibody heavy chain; an immunoglobulin molecule comprising the CH1 and CH2 domains of an antibody heavy chain; an immunoglobulin molecule comprising the CH1, CH2 and CH3 domains of an antibody heavy chain; or any of the subset (ii) in conjunction with the CL (kappa or lambda subclass) domain of an antibody. A hinge region domain may also be included. Such combinations of domains may, for example, mimic natural antibodies, such as IgG or IgM, or fragments thereof, such as Fv, scFv, Fab or F(ab′)₂ molecules. Those skilled in the art will be aware that this list is not intended to be exhaustive.

### Protein Scaffolds

[0220] Each epitope binding domain comprises a protein scaffold and one or more CDRs which are involved in the specific interaction of the domain with one or more epitopes. Advantageously, an epitope binding domain according to the present invention comprises three CDRs. Suitable protein scaffolds include any of those selected from the group consisting of the following: those based on immunoglobulin domains, those based on fibronectin, those based on affibodies, those based on CTLA4, those based on chaperones such as GroEL, those based on lipocallin and those based on the bacterial Fc receptors SpA and SpD. Those skilled in the art will appreciate that this list is not intended to be exhaustive.

### Scaffolds for Use in Constructing Ligands

### Selection of the Main-Chain Conformation

[0221] The members of the immunoglobulin superfamily all share a similar fold for their polypeptide chain. For example, although antibodies are highly diverse in terms of their primary sequence, comparison of sequences and crystallographic structures has revealed that, contrary to expectation, five of the six antigen binding loops of antibodies (H1, H2, L1, L2, L3) adopt a limited number of main-chain conformations, or canonical structures (Chothia and Lesk (1987) J. Mol. Biol., 196: 901; Chothia et al. (1989) Nature, 342: 877). Analysis of loop lengths and key residues has therefore enabled prediction of the main-chain conformations of H1, H2, L1, L2 and L3 found in the majority of human antibodies (Chothia et al. (1992) J. Mol. Biol., 227: 799; Tomlinson et al. (1995) EMBO J., 14: 4628; Williams et al. (1996) J. Mol. Biol., 264: 220). Although the H3 region is much more diverse in terms of sequence, length and structure (due to the use of D segments), it also forms a limited number of main-chain conformations for short loop lengths which depend on the length and the presence of particular residues, or types of residue, at key positions in the loop and the antibody framework (Martin et al. (1996) J. Mol. Biol., 263: 800; Shirai et al. (1996) FEBS Letters, 399: 1).

[0222] Libraries of ligands and/or domains can be designed in which certain loop lengths and key residues have been chosen to ensure that the main-chain conformation of the members is known. Advantageously, these are real conformations of immunoglobulin superfamily molecules found in nature, to minimise the chances that they are non-functional, as discussed above. Germline V gene segments serve as one suitable basic framework for constructing antibody or T-cell receptor libraries; other sequences are also of use. Variations may occur at a low frequency, such that a small number of functional members may possess an altered main-chain conformation, which does not affect its function.

[0223] Canonical structure theory is also of use to assess the number of different main-chain conformations encoded by ligands, to predict the main-chain conformation based on ligand sequences and to choose residues for diversification which do not affect the canonical structure. It is known that, in the human V_{κ} domain, the L1 loop can adopt one of four canonical structures, the L2 loop has a single canonical structure and that 90% of human V_{κ} domains adopt one of four or five canonical structures for the L3 loop (Tomlinson et al. (1995) supra); thus, in the V_{κ} domain alone, different canonical structures can combine to create a range of different main-chain conformations. Given that the V_{λ} domain encodes a different range of canonical structures for the L1, L2 and L3 loops and that V_{λ} and V_{λ} domains can pair with any V_{H} domain which can encode several canonical structures for the H1 and H2 loops, the number of canonical structure combinations observed for these five loops is very large. This implies that the generation of diversity in the main-chain conformation may be essential for the production of a wide range of binding specificities. However, by constructing an antibody library based on a single known main-chain conformation it has been found, contrary to expectation, that diversity in the main-chain conformation is not required to generate sufficient diversity to target substantially all antigens. Even more surprisingly, the single main-chain conformation need not be a consensus structure—a single naturally occurring conformation can be used as the basis for an entire library. Thus, in a preferred aspect, the dual-specific ligands of the invention possess a single known main-chain conformation.

[0224] The single main-chain conformation that is chosen is preferably commonplace among molecules of the immunoglobulin superfamily type in question. A conformation is commonplace when a significant number of naturally occurring molecules are observed to adopt it. Accordingly, in a preferred aspect of the invention, the natural occurrence of the different main-chain conformations for each binding loop of an immunoglobulin domain are considered separately and then a naturally occurring variable domain is chosen which possesses the desired combination of main-chain conformations for the different loops. If none is available, the nearest equivalent may be chosen. It is preferable that the desired combination of main-chain conformations for the different loops is created by selecting germline gene segments which encode the desired main-chain conformations. It is more preferable, that the selected germline gene segments are frequently expressed in nature, and most preferable that they are the most frequently expressed of all natural germline gene segments.

[0225] In designing ligands (e.g., dAbs) or libraries thereof the incidence of the different main-chain conformations for each of the six antigen binding loops may be considered separately. For H1, H2, L1, L2 and L3, a given conformation that is adopted by between 20% and 100% of the antigen binding loops of naturally occurring molecules is chosen. Typically, its observed incidence is above 35% (i.e. between 35% and 100%) and, ideally, above 50% or even above 65%. Since the vast majority of H3 loops do not have canonical structures, it is preferable to select a main-chain conformation which is commonplace among those loops which do display canonical structures. For each of the loops, the conformation which is observed most often in the natural repertoire is therefore selected. In human antibodies, the most popular canonical structures (CS) for each loop are as follows: H1-CS 1 (79% of the expressed repertoire), H2-CS 3 (46%), L1-CS 2 of V_{κ} (39%), L2-CS 1 (100%), L3-CS 1 of V_{κ} (36%) (calculation assumes a κ:λ ratio of 70:30, Hood et al. (1967) Cold Spring Harbor Symp. Quant. Biol., 48: 133). For H3 loops that have canonical structures, a CDR3 length (Kabat et al. (1991) Sequences of proteins of immunological interest, U.S. Department of Health and Human Services) of seven residues with a salt-bridge from residue 94 to residue 101 appears to be the most common. There are at least 16 human antibody sequences in the EMBL data library with the required H3 length and key residues to form this conformation and at least two crystallographic structures in the protein data bank which can be used as a basis for antibody modelling (2cgr and 1tet). The most frequently expressed germline gene segments that this combination of canonical structures are the V_{H} segment 3-23 (DP47), the J_{H} segment JH4b, the V_{κ} segment O2/O12 (DPK9) and the J_{κ} segment J_{κ}1. V_{H} segments DP45 and DP38 are also suitable. These segments can therefore be used in combination as a basis to construct a library with the desired single main-chain conformation.

[0226] Alternatively, instead of choosing the single main-chain conformation based on the natural occurrence of the different main-chain conformations for each of the binding loops in isolation, the natural occurrence of combinations of main-chain conformations is used as the basis for choosing the single main-chain conformation. In the case of antibodies, for example, the natural occurrence of canonical structure combinations for any two, three, four, five or for all six of the antigen binding loops can be determined. Here, it is preferable that the chosen conformation is commonplace in naturally occurring antibodies and most preferable that it observed most frequently in the natural repertoire. Thus, in human antibodies, for example, when natural combinations of the five antigen binding loops, H1, H2, L1, L2 and L3, are considered, the most frequent combination of canonical structures is determined and then combined with the most popular conformation for the H3 loop, as a basis for choosing the single main-chain conformation.

### Diversification of the Canonical Sequence

[0227] Having selected several known main-chain conformations or, preferably a single known main-chain conformation, ligands (e.g., dAbs) or libraries for use in the invention can be constructed by varying the binding site of the molecule in order to generate a repertoire with structural and/or functional diversity. This means that variants are generated such that they possess sufficient diversity in their structure and/or in their function so that they are capable of providing a range of activities.

[0228] The desired diversity is typically generated by varying the selected molecule at one or more positions. The positions to be changed can be chosen at random or are preferably selected. The variation can then be achieved either by randomisation, during which the resident amino acid is replaced by any amino acid or analogue thereof, natural or synthetic, producing a very large number of variants or by replacing the resident amino acid with one or more of a defined subset of amino acids, producing a more limited number of variants.

[0229] Various methods have been reported for introducing such diversity. Error-prone PCR (Hawkins et al. (1992) J. Mol. Biol., 226: 889), chemical mutagenesis (Deng et al. (1994) J. Biol. Chem., 269: 9533) or bacterial mutator strains (Low et al. (1996) J. Mol. Biol., 260: 359) can be used to introduce random mutations into the genes that encode the molecule. Methods for mutating selected positions are also well known in the art and include the use of mismatched oligonucleotides or degenerate oligonucleotides, with or without the use of PCR. For example, several synthetic antibody libraries have been created by targeting mutations to the antigen binding loops. The H3 region of a human tetanus toxoid-binding Fab has been randomised to create a range of new binding specificities (Barbas et al. (1992) Proc. Natl. Acad. Sci. USA, 89: 4457). Random or semi-random H3 and L3 regions have been appended to germline V gene segments to produce large libraries with unmutated framework regions (Hoogenboom & Winter (1992) J. Mol. Biol., 227: 381; Barbas et al. (1992) Proc. Natl. Acad. Sci. USA, 89: 4457; Nissim et al. (1994) EMBO J., 13: 692; Griffiths et al. (1994) EMBO J., 13: 3245; De Kruif et al. (1995) J. Mol. Biol., 248:97). Such diversification has been extended to include some or all of the other antigen binding loops (Crameri et al. (1996) Nature Med., 2: 100; Riechmann et al. (1995) Bio/Technology, 13: 475; Morphosys, WO97/08320, supra).

[0230] Since loop randomisation has the potential to create approximately more than 10¹⁵ structures for H3 alone and a similarly large number of variants for the other five loops, it is not feasible using current transformation technology or even by using cell free systems to produce a library representing all possible combinations. For example, in one of the largest libraries constructed to date, 6×10¹⁰ different antibodies, which is only a fraction of the potential diversity for a library of this design, were generated (Griffiths et al. (1994) supra).

[0231] Preferably, only the residues which are directly involved in creating or modifying the desired function of the molecule are diversified. For many molecules, the function will be to bind a target and therefore diversity should be concentrated in the target binding site, while avoiding changing residues which are crucial to the overall packing of the molecule or to maintaining the chosen main-chain conformation.

### Diversification of the Canonical Sequence as it Applies to Antibody Domains

[0232] In the case of antibody based ligands (e.g., dAbs), the binding site for the target is most often the antigen binding site. Thus, preferably only those residues in the antigen binding site are varied. These residues are extremely diverse in the human antibody repertoire and are known to make contacts in high-resolution antibody/antigen complexes. For example, in L2 it is known that positions 50 and 53 are diverse in naturally occurring antibodies and are observed to make contact with the antigen. In contrast, the conventional approach would have been to diversify all the residues in the corresponding Complementarity Determining Region (CDR1) as defined by Kabat et al. (1991, supra), some seven residues compared to the two diversified in the library for use according to the invention. This represents a significant improvement in terms of the functional diversity required to create a range of antigen binding specificities.

[0233] In nature, antibody diversity is the result of two processes: somatic recombination of germline V, D and J gene segments to create a naive primary repertoire (so called germline and junctional diversity) and somatic hypermutation of the resulting rearranged V genes. Analysis of human antibody sequences has shown that diversity in the primary repertoire is focused at the centre of the antigen binding site whereas somatic hypermutation spreads diversity to regions at the periphery of the antigen binding site that are highly conserved in the primary repertoire (see Tomlinson et al. (1996) J. Mol. Biol., 256: 813). This complementarity has probably evolved as an efficient strategy for searching sequence space and, although apparently unique to antibodies, it can easily be applied to other polypeptide repertoires. The residues which are varied are a subset of those that form the binding site for the target. Different (including overlapping) subsets of residues in the target binding site are diversified at different stages during selection, if desired.

[0234] In the case of an antibody repertoire, an initial ‘naive’ repertoire can be created where some, but not all, of the residues in the antigen binding site are diversified. As used herein in this context, the term “naive” refers to antibody molecules that have no pre-determined target. These molecules resemble those which are encoded by the immunoglobulin genes of an individual who has not undergone immune diversification, as is the case with fetal and newborn individuals, whose immune systems have not yet been challenged by a wide variety of antigenic stimuli. This repertoire is then selected against a range of antigens or epitopes. If required, further diversity can then be introduced outside the region diversified in the initial repertoire. This matured repertoire can be selected for modified function, specificity or affinity.

[0235] Naive repertoires of binding domains for the construction of ligands in which some or all of the residues in the antigen binding site are varied are known in the art. (See, WO 2004/058821, WO 2004/003019, and WO 03/002609). The “primary” library mimics the natural primary repertoire, with diversity restricted to residues at the centre of the antigen binding site that are diverse in the germline V gene segments (germline diversity) or diversified during the recombination process (junctional diversity). Those residues which are diversified include, but are not limited to, H50, H52, H52a, H53, H55; H56, H58, H95, H96, H97, H98, L50, L53, L91, L92, L93, L94 and L96. In the “somatic” library, diversity is restricted to residues that are diversified during the recombination process (junctional diversity) or are highly somatically mutated). Those residues which are diversified include, but are not limited to: H31, H33, H35, H95, H96, H97, H98, L30, L31, L32, L34 and L96. All the residues listed above as suitable for diversification in these libraries are known to make contacts in one or more antibody-antigen complexes. Since in both libraries, not all of the residues in the antigen binding site are varied, additional diversity is incorporated during selection by varying the remaining residues, if it is desired to do so. It shall be apparent to one skilled in the art that any subset of any of these residues (or additional residues which comprise the antigen binding site) can be used for the initial and/or subsequent diversification of the antigen binding site.

[0236] In the construction of libraries for use in the invention, diversification of chosen positions is typically achieved at the nucleic acid level, by altering the coding sequence which specifies the sequence of the polypeptide such that a number of possible amino acids (all 20 or a subset thereof) can be incorporated at that position. Using the IUPAC nomenclature, the most versatile codon is NNK, which encodes all amino acids as well as the TAG stop codon. The NNK codon is preferably used in order to introduce the required diversity. Other codons which achieve the same ends are also of use, including the NNN codon, which leads to the production of the additional stop codons TGA and TAA.

[0237] A feature of side-chain diversity in the antigen binding site of human antibodies is a pronounced bias which favours certain amino acid residues. If the amino acid composition of the ten most diverse positions in each of the V_{H}, V_{κ} and V_{λ} regions are summed, more than 76% of the side-chain diversity comes from only seven different residues, these being, serine (24%), tyrosine (14%), asparagine (11%), glycine (9%), alanine (7%), aspartate (6%) and threonine (6%). This bias towards hydrophilic residues and small residues which can provide main-chain flexibility probably reflects the evolution of surfaces which are predisposed to binding a wide range of antigens or epitopes and may help to explain the required promiscuity of antibodies in the primary repertoire.

[0238] Since it is preferable to mimic this distribution of amino acids, the distribution of amino acids at the positions to be varied preferably mimics that seen in the antigen binding site of antibodies. Such bias in the substitution of amino acids that permits selection of certain polypeptides (not just antibody polypeptides) against a range of target antigens is easily applied to any polypeptide repertoire. There are various methods for biasing the amino acid distribution at the position to be varied (including the use of tri-nucleotide mutagenesis, see WO97/08320), of which the preferred method, due to ease of synthesis, is the use of conventional degenerate codons. By comparing the amino acid profile encoded by all combinations of degenerate codons (with single, double, triple and quadruple degeneracy in equal ratios at each position) with the natural amino acid use it is possible to calculate the most representative codon. The codons (AGT)(AGC)T, (AGT)(AGC)C and (AGT)(AGC)(CT)—that is, DVT, DVC and DVY, respectively using IUPAC nomenclature—are those closest to the desired amino acid profile: they encode 22% serine and 11% tyrosine, asparagine, glycine, alanine, aspartate, threonine and cysteine. Preferably, therefore, libraries are constructed using either the DVT, DVC or DVY codon at each of the diversified positions.

### Therapeutic and Diagnostic Compositions and Uses

[0239] The invention provides compositions comprising a ligand of the invention (e.g., dual-specific ligand, multi-specific ligand, dAb monomer) and a pharmaceutically acceptable carrier, diluent or excipient, and therapeutic and diagnostic methods that employ the ligands or compositions of the invention. Ligands (e.g., dual-specific ligands, multispecific ligands, dAb monomers) according to the method of the present invention may be employed in in vivo therapeutic and prophylactic applications, in vivo diagnostic applications and the like.

[0240] Therapeutic and prophylactic uses of ligands (e.g., multispecific ligands, dual-specific ligands, dAb monomers) of the invention involve the administration of ligands according to the invention to a recipient mammal, such as a human. Dual-specific and multi-specific ligands (e.g., dual-specific antibody formats) bind to multimeric antigen with great avidity. Dual- or multi-specific ligands can allow the cross-linking of two antigens, for example in recruiting cytotoxic T-cells to mediate the killing of tumour cell lines.

[0241] Substantially pure ligands, for example dAb monomers, of at least 90 to 95% homogeneity are preferred for administration to a mammal, and 98 to 99% or more homogeneity is most preferred for pharmaceutical uses, especially when the mammal is a human. Once purified, partially or to homogeneity as desired, the ligands may be used diagnostically or therapeutically (including extracorporeally) or in developing and performing assay procedures, immunofluorescent stainings and the like (Lefkovite and Pernis, (1979 and 1981) Immunological Methods, Volumes I and II, Academic Press, NY).

[0242] For example, the ligands (e.g., dAb monomers), of the present invention will typically find use in preventing, suppressing or treating inflammation or inflammatory states including acute inflammatory diseases and/or chronic inflammatory diseases. The ligands (e.g., dAb monomers), of the present invention can also be administered to inhibit biological processes that are induced by binding of IL-1 (e.g., IL-1α and/or IL-1β) to IL-1R1.

[0243] In the instant application, the term “prevention” involves administration of the protective composition prior to the induction of the disease. “Suppression” refers to administration of the composition after an inductive event, but prior to the clinical appearance of the disease. “Treatment” involves administration of the protective composition after disease symptoms become manifest.

[0244] The ligands of the invention, including dAb monomers, can be administered to prevent, suppress or treat a chronic inflammatory disease, allergic hypersensitivity, cancer, bacterial or viral infection, autoimmune disorders (which include, but are not limited to, Type I diabetes, asthma, multiple sclerosis, systemic lupus erythematosus, inflammatory bowel disease (e.g., Crohn's disease, ulcerative colitis), myasthenia gravis and Behcet's syndrome), psoriasis, endometriosis, and abdominal adhesions (e.g., post abdominal surgery).

[0245] The ligands of the invention, including dAb monomers, can be administered to prevent, suppress or treat lung inflammation, chronic obstructive respiratory disease (e.g., chronic bronchitis, chronic obstructive bronchitis, emphysema), asthma (e.g., steroid resistant asthma), pneumonia (e.g., bacterial pneumonia, such as Staphylococcal pneumonia), hypersensitivity pneumonitis, pulmonary infiltrate with eosinophilia, environmental lung disease, bronchiectasis, cystic fibrosis, interstitial lung disease, primary pulmonary hypertension, pulmonary thromboembolism, disorders of the pleura, disorders of the mediastinum, disorders of the diaphragm, hypoventilation, hyperventilation, sleep apnea, acute respiratory distress syndrome, mesothelioma, sarcoma, graft rejection, graft versus host disease, lung cancer, allergic rhinitis, allergy, asbestosis, aspergilloma, aspergillosis, chronic bronchitis, emphysema, eosinophilic pneumonia, idiopathic pulmonary fibrosis, invasive pneumococcal disease (IPD), influenza, nontuberculous mycobacteria, pleural effusion, pneumoconiosis, pneumocytosis, pulmonary actinomycosis, pulmonary alveolar proteinosis, pulmonary anthrax, pulmonary edema, pulmonary embolus, pulmonary inflammation, pulmonary histiocytosis X (eosinophilic granuloma), pulmonary hypertension, pulmonary nocardiosis, pulmonary tuberculosis, pulmonary veno-occlusive disease, rheumatoid lung disease, sarcoidosis, Wegener's granulomatosis, and non-small cell lung carcinoma.

[0246] The ligands of the invention, including dAb monomers, can be administered to prevent, suppress or treat influenza, RSV-associated respiratory disease and viral lung (respiratory) disease.

[0247] The ligands of the invention, including dAb monomers, can be administered to prevent, suppress or treat osteoarthritis or inflammatory arthritis. “Inflammatory arthritis” refers to those diseases of joints where the immune system is causing or exacerbating inflammation in the joint, and includes rheumatoid arthritis, juvenile rheumatoid arthritis, and spondyloarthropathies, such as ankylosing spondylitis, reactive arthritis, Reiter's syndrome, psoriatic arthritis, psoriatic spondylitis, enteropathic arthritis, enteropathic spondylitis, juvenile-onset spondyloarthropathy and undifferentiated spondyloarthropathy. Inflammatory arthritis is generally characterized by infiltration of the synovial tissue and/or synovial fluid by leukocytes.

[0248] Ligands according to the invention (e.g., dual-specific ligands, multispecific ligands, dAb monomers) which bind to extracellular targets involved in endocytosis (e.g., Clathrin) can be endocytosed, enabling access to intracellular targets. In addition, dual or multispecific ligands, provide a means by which a binding domain (e.g., a dAb monomer) that is able to bind to an intracellular target can be delivered to an intracellular environment. This strategy requires, for example, a dual-specific ligand with physical properties that enable it to remain functional inside the cell. Alternatively, if the final destination intracellular compartment is oxidising, a well folding ligand may not need to be disulphide free.

[0249] Advantageously, dual- or multi-specific ligands may be used to target cytokine receptors and other molecules which cooperate synergistically in therapeutic situations in the body of an organism. The invention therefore provides a method for synergising the activity of two or more binding domains (e.g., dAbs) that bind cytokine receptors or other molecules, comprising administering a dual- or multi-specific ligand capable of binding to said two or more molecules (e.g., cytokine receptors). In this aspect of the invention, the dual- or multi-specific ligand may be any dual- or multi-specific ligand, for example, this aspect of the invention relates to combinations of V_{H} domains and V_{L} domains, V_{H} domains only and V_{L} domains only.

[0250] Synergy in a therapeutic context may be achieved in a number of ways. For example, target combinations may be therapeutically active only if both targets are targeted by the ligand, whereas targeting one target alone is not therapeutically effective. In another embodiment, one target alone may provide some therapeutic effect, but together with a second target the combination provides a synergistic increase in therapeutic effect (a more than additive effect).

[0251] Animal model systems which can be used to screen the effectiveness of the ligands of the invention in protecting against or treating the disease are available. Methods for the testing of systemic lupus erythematosus (SLE) in susceptible mice are known in the art (Knight et al. (1978) J. Exp. Med., 147: 1653; Reinersten et al. (1978) New Eng. J. Med., 299: 515). Myasthenia Gravis (MG) is tested in SJL/J female mice by inducing the disease with soluble AchR protein from another species (Lindstrom et al. (1988) Adv. Immunol., 42: 233). Arthritis is induced in a susceptible strain of mice by injection of Type II collagen (Stuart et al. (1984) Ann. Rev. Immunol., 42: 233). A model by which adjuvant arthritis is induced in susceptible rats by injection of mycobacterial heat shock protein has been described (Van Eden et al. (1988) Nature, 331: 171). Thyroiditis is induced in mice by administration of thyroglobulin as described (Maron et al. (1980) J. Exp. Med., 152: 1115). Insulin dependent diabetes mellitus (IDDM) occurs naturally or can be induced in certain strains of mice such as those described by Kanasawa et al. (1984) Diabetologia, 27: 113. EAE in mouse and rat serves as a model for MS in human. In this model, the demyelinating disease is induced by administration of myelin basic protein (see Paterson (1986) Textbook of Immunopathology, Mischer et al., eds., Grune and Stratton, New York, pp. 179-213; McFarlin et al. (1973) Science, 179: 478: and Satoh et al. (1987) J. Immunol., 138: 179). Other suitable models are described herein.

[0252] Generally, the ligands will be utilised in purified form together with pharmacologically appropriate carriers. Typically, these carriers include aqueous or alcoholic/aqueous solutions, emulsions or suspensions, including saline and/or buffered media. Parenteral vehicles include sodium chloride solution, Ringer's dextrose, dextrose and sodium chloride and lactated Ringer's. Suitable physiologically-acceptable adjuvants, if necessary to keep a polypeptide complex in suspension, may be chosen from thickeners such as carboxymethylcellulose, polyvinylpyrrolidone, gelatin and alginates.

[0253] Intravenous vehicles include fluid and nutrient replenishers and electrolyte replenishers, such as those based on Ringer's dextrose. Preservatives and other additives, such as antimicrobials, antioxidants, chelating agents and inert gases, may also be present. Formulation will depend on the route of administration, a variety of suitable formulations can be used, including extended release formulations. (See, e.g., Mack (1982). Remington's Pharmaceutical Sciences, 16th Edition.)

[0254] The ligands (e.g., dAb monomers) can be administered and or formulated together with one or more additional therapeutic or active agents. When a ligand is administered with an additional therapeutic agent, the ligand can be administered before, simultaneously with or subsequent to administration of the additional agent. Generally, the ligand (e.g., dAb monomer) and additional agent are administered in a manner that provides an overlap of therapeutic effect. Additional agents that can be administered or formulated with the ligand of the invention include, for example, various immunotherapeutic drugs, such as cylcosporine, methotrexate, adriamycin or cisplatinum, antibiotics, antimycotics, anti-viral agents and immunotoxins. For example, when the antagonist is administered to prevent, suppress or treat lung inflammation or a respiratory disease, it can be administered in conjunction with phosphodiesterase inhibitors (e.g., inhibitors of phosphodiesterase 4), bronchodilators (e.g., beta2-agonists, anticholinergerics, theophylline), short-acting beta-agonists (e.g., albuterol, salbutamol, bambuterol, fenoterol, isoetherine, isoproterenol, levalbuterol, metaproterenol, pirbuterol, terbutaline and tornlate), long-acting beta-agonists (e.g., formoterol and salmeterol), short acting anticholinergics (e.g., ipratropium bromide and oxitropium bromide), long-acting anticholinergics (e.g., tiotropium), theophylline (e.g., short acting formulation, long acting formulation), inhaled steroids (e.g., beclomethasone, beclomethasone, budesonide, flunisolide, fluticasone propionate and triamcinolone), oral steroids (e.g., methylprednisolone, prednisolone, prednisolone and prednisone), combined short-acting beta-agonists with anticholinergics (e.g., albuterol/salbutamol/ipratropium, and fenoterol/ipratropium), combined long-acting beta-agonists with inhaled steroids (e.g., salmeterol/fluticasone, and formoterol/budesonide) and mucolytic agents (e.g., erdosteine, acetylcysteine, bromheksin, carbocysteine, guaifenesin and iodinated glycerol.

[0255] When the antagonist is administered to prevent, suppress or treat arthritis (e.g., inflammatory arthritis (e.g., rheumatoid arthritis)), it can be administered in conjunction with a disease modifying anti-rheumatic agent (e.g., methotrexate, hydroxychloroquine, sulfasalazine, leflunomide, azathioprine, D-penicillamine, gold (oral or intramuscular), minocycline, cyclosporine, staphylococcal protein A), nonsteroidal anti-inflammatory agent (e.g., COX-2 selective NSAIDS such as rofecoxib), salicylates, glucocorticoids (e.g., predisone) and analgesics.

[0256] Pharmaceutical compositions can include “cocktails” of various cytotoxic or other agents in conjunction with ligands of the present invention, or even combinations of ligands according to the present invention having different specificities, such as ligands selected using different target antigens or epitopes, whether or not they are pooled prior to administration.

[0257] The route of administration of pharmaceutical compositions according to the invention may be any of those commonly known to those of ordinary skill in the art. For therapy, including without limitation immunotherapy, the selected ligands thereof of the invention can be administered to any patient in accordance with standard techniques. The administration can be by any appropriate mode, including parenterally (e.g., intravenous, intramuscular, intraperitoneal, intra-articular, intrathecal), transdermally, via the pulmonary route, or also, appropriately, by direct infusion with a catheter. The dosage and frequency of administration will depend on the age, sex and condition of the patient, concurrent administration of other drugs, counterindications and other parameters to be taken into account by the clinician. Administration can be local (e.g., local delivery to the lung by pulmonary administration, e.g., intranasal administration) or systemic as indicated.

[0258] The ligands of this invention can be lyophilised for storage and reconstituted in a suitable carrier prior to use. This technique has been shown to be effective with conventional immunoglobulins and art-known lyophilisation and reconstitution techniques can be employed. It will be appreciated by those skilled in the art that lyophilisation and reconstitution can lead to varying degrees of antibody activity loss (e.g., with conventional immunoglobulins, IgM antibodies tend to have greater activity loss than IgG antibodies) and that use levels may have to be adjusted upward to compensate.

[0259] The compositions containing the present antagonists (e.g., ligands) or a cocktail thereof can be administered for prophylactic and/or therapeutic treatments. In certain therapeutic applications, an adequate amount to accomplish at least partial inhibition, suppression, modulation, killing, or some other measurable parameter, of a population of selected cells is defined as a “therapeutically-effective dose.” For example, for treating lung inflammation and/or a respiratory disease, a sputum-inhibiting amount, a bronchial biopsy inflammation-inhibiting amount, a dyspnoea-inhibiting amount, a forced expiratory volume in one second (FEV (1)) increasing amount, an improvement in health status increasing amount, as quantified in a suitable questionnaire such as the St. George's Respiratory Questionnaire (e.g., an improvement score of 4 points) can be administered. In another example, for treating arthritis (e.g., inflammatory arthritis (e.g., rheumatoid arthritis)), an amount sufficient to achieve a 20% or greater improvement in at least 3 of the American College of Rheumatology core set measures can be administered (Felson et al., Arthritis and Rheumatism, 38:727-735 (1995)).

[0260] Amounts needed to achieve this dosage will depend upon the severity of the disease and the general state of the patient, including the patients age, sex, weight, general health (e.g., the state of the patients immune system). Based on these and other appropriate criteria, the skilled clinician can determine the appropriate amount of ligand to be administered. Generally the amount can range from 0.005 to 5.0 mg of ligand per kilogram of body weight, with doses of 0.05 to 2.0 mg/kg/dose being more commonly used. For prophylactic applications, compositions containing the present ligands or cocktails thereof may also be administered in similar or slightly lower dosages, to prevent, inhibit or delay onset of disease (e.g., to sustain remission or quiescence, or to prevent acute phase). The skilled clinician will be able to determine the appropriate dosing interval to treat, suppress or prevent disease. The ligand of the invention can be administered up to four times per day, twice weekly, once weekly, once every two weeks, once a month, or once every two months, at a dose off, for example, about 10 μg/kg to about 80 mg/kg, about 100 μg/kg to about 80 mg/kg, about 1 mg/kg to about 80 mg/kg, about 1 mg/kg to about 70 mg/kg, about 1 mg/kg to about 60 mg/kg, about 1 mg/kg to about 50 mg/kg, about 1 mg/kg to about 40 mg/kg, about 1 mg/kg to about 30 mg/kg, about 1 mg/kg to about 20 mg/kg, about 1 mg/kg to about 10 mg/kg, about 10 μg/kg to about 10 mg/kg, about 10 μg/kg to about 5 mg/kg, about 10 μg/kg to about 2.5 mg/kg, about 1 mg/kg, about 2 mg/kg, about 3 mg/kg, about 4 mg/kg, about 5 mg/kg, about 6 mg/kg, about 7 mg/kg, about 8 mg/kg, about 9 mg/kg or about 10 mg/kg. In particular embodiments, the ligand is administered to treat, suppress or prevent a chronic inflammatory disease once every two weeks or once a month at a dose of about 10 μg/kg to about 10 mg/kg (e.g., about 10 μg/kg, about 100 μg/kg, about 1 mg/kg, about 2 mg/kg, about 3 mg/kg, about 4 mg/kg, about 5 mg/kg, about 6 mg/kg, about 7 mg/kg, about 8 mg/kg, about 9 mg/kg or about 10 mg/kg.)

[0261] Treatment or therapy performed using the compositions described herein is considered “effective” if one or more symptoms are reduced (e.g., by at least 10% or at least one point on a clinical assessment scale), relative to such symptoms present before treatment, or relative to such symptoms in an individual (human or model animal) not treated with such composition or other suitable control. Symptoms will obviously vary depending upon the disease or disorder targeted, but can be measured by an ordinarily skilled clinician or technician. Such symptoms can be measured, for example, by monitoring the level of one or more biochemical indicators of the disease or disorder (e.g., levels of an enzyme or metabolite correlated with the disease, affected cell numbers, etc.), by monitoring physical manifestations (e.g., inflammation, tumor size, etc.), or by an accepted clinical assessment scale, for example, the Expanded Disability Status Scale (for multiple sclerosis), the Irvine Inflammatory Bowel Disease Questionnaire (32 point assessment evaluates quality of life with respect to bowel function, systemic symptoms, social function and emotional status—score ranges from 32 to 224, with higher scores indicating a better quality of life), the Quality of Life Rheumatoid Arthritis Scale, the American College of Rheumatology core set measures, or other accepted clinical assessment scale as known in the field. A sustained (e.g., one day or more, preferably longer) reduction in disease or disorder symptoms by at least 10% or by one or more points on a given clinical scale is indicative of “effective” treatment. Similarly, prophylaxis performed using a composition as described herein is “effective” if the onset or severity of one or more symptoms is delayed, reduced or abolished relative to such symptoms in a similar individual (human or animal model) not treated with the composition.

[0262] A composition containing an ligand or cocktail thereof according to the present invention may be utilised in prophylactic and therapeutic settings to aid in the alteration, inactivation, killing or removal of a select target cell population in a mammal. In addition, the selected repertoires of polypeptides described herein may be used extracorporeally or in vitro selectively to kill, deplete or otherwise effectively remove a target cell population from a heterogeneous collection of cells. Blood from a mammal may be combined extracorporeally with the ligands, e.g., antibodies, cell-surface receptors or binding proteins thereof whereby the undesired cells are killed or otherwise removed from the blood for return to the mammal in accordance with standard techniques.

[0263] A composition containing an antagonist (e.g., ligand) according to the present invention may be utilised in prophylactic and therapeutic settings to aid in the alteration, inactivation, killing or removal of a select target cell population in a mammal.

[0264] In one embodiment, the invention is a method for treating, suppressing or preventing a chronic inflammatory disease, comprising administering to a mammal in need thereof a therapeutically-effective dose or amount of a ligand of the invention.

[0265] In one embodiment, the invention is a method for treating, suppressing or preventing arthritis (e.g., Inflammatory arthritis (e.g., rheumatoid arthritis, juvenile rheumatoid arthritis, and spondyloarthropathies, such as ankylosing spondylitis, reactive arthritis, Reiter's syndrome, psoriatic arthritis, psoriatic spondylitis, enteropathic arthritis, enteropathic spondylitis, juvenile-onset spondyloarthropathy and undifferentiated spondyloarthropathy)) comprising administering to a mammal in need thereof a therapeutically-effective dose or amount of a ligand of the invention.

[0266] In another embodiment, the invention is a method for treating, suppressing or preventing inflammatory bowel disease (e.g., Crohn's disease, ulcerative colitis) comprising administering to a mammal in need thereof a therapeutically-effective dose or amount of a ligand of the invention.

### EXAMPLES

### Example 1

### Methods

### Selections and Screening

[0267] For primary selections, 4G-K2 library of Vκ dAbs was panned against IL-1R1-Fc fusion protein (Axxora, Nottingham, UK). Domain antibodies from the primary selection were subjected to three further rounds of selection. Round 1 was performed using protein G coated magnetic beads (Dynal, Norway) and 100 nM IL-1R1-Fc; round 2 was performed using anti-human IgG beads (Novagen, Merck Biosciences, Nottingham, UK) and 10 nM IL-1R1-Fc; and round 3 was performed using protein G beads and 1 nM IL-1R1-Fc. (Henderikx et al., Selection of antibodies against biotinylated antigens. Antibody Phage Display Methods and protocols, Ed. O'Brien and Atkin, Humana Press (2002).) Elution at each stage was with 1 mg/ml trypsin-phosphate buffered saline (PBS). For affinity maturation selections, the above method was used, but with the following modifications: two rounds of selection were performed using protein G beads, round 1 using 1 nM IL-1R1-Fc, and round 2 using 100 pM IL-1R1-Fc. Phage vectors from selection outputs (rounds 2 and 3) were isolated by plasmid preps (Qiagen) and dAb inserts were released by restriction digest with Sal I and Not I. This inserts were ligated into a phage expression vector (Sal I/Not I cut pDOM5) and used to transform E. coli strain HB2151 for soluble expression and screening of dAbs.

### Supernatant Receptor Binding Assay (RBA)

[0268] Single transformed E. coli colonies were picked into 96-well plates containing 2xTY supplemented with 100 μg/ml carbenicillin and 0.1% (w/v) glucose, grown at 37° C. to ˜OD₆₀₀=0.9 and induced with 1 mM IPTG. Supernatants from overnight inductions at 30° C. were screened in a receptor binding assay for the ability to inhibit binding of IL-1β to IL-1R1 captured on an ELISA plate. Briefly, MaxiSorp™ immunoassay plates (Nunc, Denmark) were incubated overnight with anti-IL-1R1 mouse monoclonal antibody (R&D Systems, Minneapolis, USA). The wells were washed with phosphate buffered saline (PBS) containing 0.1% (v/v) Tween-20 and then blocked with 1% (w/v) BSA in PBS before being incubated with recombinant IL-1R1 (500 ng/ml, R&D Systems). The E. coli culture supernatants containing dAbs to be screened were placed in the washed wells of the assay plate, the plate was incubated for 30 min at room temperature, then IL-1β (4 ng/ml, R&D Systems) was added to each well and mixed. IL-1β binding was detected using biotinylated anti-IL-1β antibody (R&D Systems), followed by peroxidase labelled anti-biotin antibody (Stratech, Soham, UK) and then, incubation with 3,3′,5,5′-tetramethylbenzidine (TMB) substrate (KPL, Gaithersburg, USA). The reaction was stopped by the addition of HCl and the absorbance was read at 450 nm. Anti-IL-1R1 dAb activity caused a decrease in IL-1β binding and therefore a decrease in absorbance compared with the IL-1β only control.

### Cell Assay

[0269] Isolated dAbs were tested for their ability to inhibit IL-1-induced IL-8 release from cultured MRC-5 cells (ATCC catalogue no. CCL-171). Briefly, 5000 trypsinised MRC-5 cells in RPMI media were placed in the well of a tissue-culture microtitre plate and mixed with IL-1α or β(R&D Systems, 200 pg/ml final concentration) and a dilution of the dAb to be tested. The mixture was incubated overnight at 37° C. and IL-8 released by the cells into to culture media was quantified in an ELISA (DuoSet®, R&D Systems). Anti-IL-1R1 dAb activity caused a decrease in IL-1 binding and a corresponding reduction in IL-8 release.

### Human Whole Blood Assay

[0270] Whole human blood was incubated with a dilution series of the dAb to be tested, and the mixture was incubated for 30 min at 37° C./5% CO₂. Next, 270 or 900 pM (final concentration) IL-1α or IL-1β was added and the mixture, and then the mixtures was incubated at 37° C./5% CO₂ for an additional 20 hours. The blood was then centrifuged (500×g, 5 min) and the IL-6 released into the supernatant was quantified in an ELISA (DuoSet®, R&D Systems). Anti-IL-1R1 dAb activity caused a decrease in IL-1 binding and a corresponding reduction in IL-6 release.

### Off-Rate Screening

[0271] These experiments were performed on a BIACORE 3000 surface plasmon resonance instrument, using a CM5 chip (Biacore) coupled with ˜600 RU of IL-1R1 (R&D Systems). Analytes were passed over the IL-1R1-coated flow-cell, with in-line referencing against a blank flow-cell, at a flow rate of 30 μl/min in HBS-EP running buffer (Biacore). Ten microlitres of supernatant containing soluble dAb was diluted 1:1 in running buffer, injected (Kinject) at 10 μl/min flow rate and allowed to dissociate in buffer. Clones with improved off-rates compared to parental clones were identified by eye, or by measurement using BIAevaluation software v4.1.

### IL-1ra Competition by Surface Plasmon Resonance

[0272] These studies were performed on a BIACORE 3000 surface plasmon resonance instrument, using a CM5 chip (Biacore) coupled with ˜600 RU of IL-1R1 (R&D Systems). Analytes were passed over the antigen-coated flow-cell, with in-line referencing against a blank flow-cell, at a flow rate of 30 μl/min in HBS-EP running buffer (Biacore). IL-1ra (100 nM, R&D Systems) was injected for 60 seconds, followed immediately by a 60 second injection of 200 nM DOM4-130-3 dAb or 100 nM IL-1α, using the co-inject facility.

### IL-1ra Competition ELISA

[0273] A MaxiSorp™ immunoassay plate (Nunc, Denmark) was coated overnight with 1 μg/ml IL-1R1-Fc, then washed three times with PBS before blocking with 1% (v/v) Tween 20 in PBS. The plates were washed again, before the addition of 500 pM IL-1ra mixed with a dilution series of DOM4-130-3 or IL-1α. Binding of IL-1ra to the receptor was detected using biotinylated anti-IL-1ra antibody (DuoSet®, R&D Systems), followed by streptavidin-HRP and developed with 3,3′,5,5′-tetramethylbenzidine (TMB) substrate (KPL, Gaithersburg, USA) as described above. Competition with IL-1ra for binding to IL-1R1 was indicated by a reduction in A₄₅₀ compared to control wells containing no IL-1ra.

### Affinity Maturation Phage Library Construction

[0274] PCR reactions were performed, using degenerate oligonucleotides containing NNK or NNS codons, to diversify the required positions in the dAb to be affinity matured. Assembly PCR was then used to generate a full length diversified insert. Inserts produced were digested with Sal I and Not I and used in a ligation reaction with cut phage vector (pDOM4). This ligation was then used to transform E. coli strain TB1 by electroporation and the transformed cells were plated on 2xTY agar containing 15 μg/ml tetracycline, yielding library sizes of >1×10⁸ clones.

### Results

### Primary Selection and Screening

[0275] Primary phage selections were performed using the 4G-K2 library and outputs sub-cloned into a soluble expression vector (pDOM5). dAb clones that inhibited binding of IL-1 to IL-1R1 were identified by supernatant RBA, then expressed, purified by protein L and tested for their ability to inhibit IL-1-induced IL-8 release in an MRC-5 cell assay. FIG. 1 shows a typical dose-response curve for anti-IL-1R1 dAb referred to as DOM4-130 in such a cell assay. The ND₅₀ of DOM4-130 in this assay was approximately 500-1000 mM.

### Affinity Maturation

### Stage I Maturation

[0276] Using DOM4-130 as a template, a maturation library was constructed with diversity encoding all 20 amino acids at positions 30, 34, 93 and 94. The resulting phage library was used in soluble selections for binding to IL-1R1 using IL-1R1-Fc. Round 2 selection output was cloned into phage expression vector (pDOM5), dabs were expressed in E. coli, and dAbs in the expression supernatants were screened for improved off-rates compared to parental dAb. Clones with improved off-rates were expressed, purified and tested in the MRC-5/IL-8 assay. FIG. 2 depicts a dose-response curve for improved variant DOM4-130-3, which had an ND₅₀ of about 30 nM.

### Stage II Maturation

[0277] Using DOM4-130-3 as template, a maturation library was constructed as described above, except this time diversity was introduced at amino acid residues 49, 50, 51 and 53 in CDR2. The resulting library was again screened for variants with improved off-rates, which were tested in the MRC-5/IL-8 cell assay. FIG. 3 depicts a dose-response curve for improved clone DOM4-130-46 (ND₅₀ about 1 nM), together with an additional variant, DOM4-130-51. DOM4-130-51 was derived from DOM4-130-46, with the mutation S67Y added to improve potency further (ND₅₀ about 300 pM). Further variants of both of these dAbs were produced by introducing the amino acid replacement R107K, to revert the amino acid sequence to the germline sequence at this position, generating DOM4-130-53 and DOM4-130-54, respectively.

Epitopic Specificity of dAbs

[0278] To determine the epitopic specificity of the anti-IL-1R1 dAbs, competitive binding assays were performed. In a study using the BIOCORE surface plasmon resonance instrument, IL-1ra was injected over a chip coupled with IL-1R1, and DOM4-130-3 or IL-1a was injected immediately after. The results are presented in FIGS. 4A and 4B. FIG. 4B shows that DOM4-130-3 did not bind to IL-1R1 that already had bound IL-1ra. When an injection of IL-1ra was followed by an injection of IL-1α, two molecules that are known to compete for binding to the receptor, the IL-1α was also unable to bind the receptor (FIG. 4B). The results were confirmed using a competition ELISA in which binding of IL-1ra to IL-1R1 in the presence of a DOM4-122-23 or IL-1a (in a series of concentrations) of was determined. The results of the ELISA showed that increasing concentrations of DOM4-130-3 dAb or IL-1α inhibited the binding of IL-1ra to IL-1R1, confirming that DOM4-130-3 competes with IL-1ra for binding to IL-1R1 (FIG. 5).

### Example 2

### Protease Stability

### Protease Stability

[0279] dAbs and ligands that comprise dAbs are useful for treating a variety of conditions, such as inflammatory conditions. In addition, as described herein, the half-life of dAbs and ligands can be tailored, for example, by PEGylation. Thus, dAbs and ligands can be administered, for example, systemically (e.g. PEGylated dAb to treat arthritis) or locally (e.g., dAb monomer to treat COPD).

[0280] The stability of two dAbs that bind IL-1R1 to the action of elastase or trypsin was investigated. Both of these proteases are found naturally at low levels within the lung, but in conditions such as COPD the levels of proteases, such as elastase, can become elevated. The dAb monomers DOM4-130-54, and a variant of DOM4-130-54 containing a point mutation that provides a cysteine residue for the specific attachment of PEG, were used in the study.

[0281] A 1 mg/ml solution of DOM4-130-54 in PBS was incubated with either 0.04% w/w trypsin or elastase (human sputum leucocyte elastase purchased from the Elastin Products Company Inc). The dAb/protease mixture was then incubated at 30° C. and samples were taken at defined time intervals (0, 1, 3 and 24 hrs) for SDS-PAGE analysis. At the given time points, the reaction was stopped by the addition SDS-PAGE loading buffer (×10 concentrated stock solution), followed by the snap freezing the samples in liquid nitrogen. Samples were analyzed by SDS-PAGE, and protein bands were visualized to reveal a time course for the protease degradation of the dAbs.

### Results

[0282] Two forms of DOM4-130-54 were tested for their stability to the action of elastase; E. coli expressed monomer and the cysteine engineered variant P80C expressed from P. pastoris. The P80C point mutation of DOM4-130-54 provides a cysteine residue for the specific attachment of PEG.

[0283] The time course for elastase degradation revealed that even after 24 hrs DOM4-130-54 showed no signs of degradation. The results also revealed that the introduction of the P80C mutation had no effect on the stability of the protein when compared to DOM4-130-54. These results indicate that the tertiary structure of the P80C variant does not substantially differ from the tertiary structure of DOM4-130-54.

[0284] The stability of the monomeric dAb DOM4-130-54 in the presence of trypsin was also tested. The time course for typsin degradation revealed that DOM4-130-54 was stable for at least 3 hours, and degradation was only seen at the 24 hr time point.

[0285] The results of this study revealed that dAbs are stable and resistant to elastase- or trypsin-mediated degradation. The demonstrated stability of dAbs to protease degradation indicates that dAbs can be administered in vivo and will remain functional for a sufficient amount of time to produce significant biological effects. For example, the results indicate that when dAbs are administered to the lung, they will be resistant to protease degradation and, thus, will be functional for a period of time that is sufficient to produce significant biological effects (e.g., bind and inhibit the activity of a target protein such as IL-1R1).

[0286] While this invention has been particularly shown and described with references to preferred embodiments thereof, it will be understood by those skilled in the art that various changes in form and details may be made therein without departing from the scope of the invention encompassed by the appended claims.

1. A domain antibody (dAb) monomer that has binding specificity for Interleukin-1 Receptor Type 1 (IL-1R1) and inhibits binding of Interleukin-1 (IL-1) Interleukin-1 Receptor Antagonist (IL-1ra) to IL-1R1.

2. The dAb monomer of claim 1 wherein said IL-1 is selected from the group consisting of Interleukin-1α (IL-1α) and Interleukin-1β (IL-1β).

3. The dAb monomer of claim 1, wherein said dAb monomer inhibits binding of said IL-1 to IL-1R1 with an IC50 that is no greater than about 1 μM.

4. The dAb monomer of claim 1, wherein said dAb monomer inhibits IL-1-induced release of Interleukin-8 by MRC-5 cells (ATCC Accession No. CCL-171) in an in vitro assay with a ND50 that is ≦1 μM.

5. The dAb monomer of claim 4, wherein said dAb monomer inhibits IL-1-induced release of Interleukin-8 by MRC-5 cells (ATCC Accession No. CCL-171) in an in vitro assay with a ND50 that is ≦1 nM.

6. The dAb monomer of claim 1, wherein said dAb monomer inhibits IL-1-induced release of Interleukin-6 in a whole blood assay with a ND50 that is ≦1 μM.

7. The dAb monomer of claim 1, wherein one or more of the framework regions (FR) in said dAb monomer comprise (a) the amino acid sequence of a human framework region, (b) at least 8 contiguous amino acids of the amino acid sequence of a human framework region, or (c) an amino acid sequence encoded by a human germline antibody gene segment, wherein said framework regions are as defined by Kabat.

8. The dAb monomer of claim 7, wherein the amino acid sequences of one or more framework regions in said dAb monomer are the same as the amino acid sequence of a corresponding framework region encoded by a human germline antibody gene segment, or the amino acid sequences of one or more of said framework regions collectively comprise up to 5 amino acid differences relative to the corresponding framework regions encoded by a human germline antibody gene segment.

9. The dAb monomer of claim 7, wherein the amino acid sequences of FR1, FR2, FR3 and FR4 in said dAb monomer are the same as the amino acid sequences of corresponding framework regions encoded by a human germline antibody gene segment, or the amino acid sequences of FR1, FR2, FR3 and FR4 collectively contain up to 10 amino acid differences relative to the corresponding framework regions encoded by a human germline antibody gene segment.

10. The dAb monomer of claim 7, wherein the dAb monomer comprises FR1, FR2 and FR3 regions, and the amino acid sequence of said FR1, FR2 and FR3 are the same as the amino acid sequences of corresponding framework regions encoded by a human germline antibody gene segment.

11. The dAb monomer of claim 7, wherein said human germline antibody gene segment is DPK9 and JK1

12. The dAb monomer of claim 1, wherein said dAb monomer competes for binding to IL-1R1 with a dAb selected from the group consisting of DOM4-130-30 (SEQ ID NO:3), DOM4-130-46 (SEQ ID NO:4), DOM4-130-51 (SEQ ID NO:5), DOM4-130-53 (SEQ ID NO:6), DOM4-130-54 (SEQ ID NO:7), DOM4-130 (SEQ ID NO:215), DOM4-130-1 (SEQ ID NO:216), DOM4-130-2 (SEQ ID NO:217), DOM4-130-3 (SEQ ID NO:218), DOM4-130-4 (SEQ ID NO:219), DOM4-130-5 (SEQ ID NO:220), DOM4-130-6 (SEQ ID NO:221), DOM4-130-7 (SEQ ID NO:222), DOM4-130-8 (SEQ ID NO:223), DOM4-130-9 (SEQ ID NO:224), DOM4-130-10 (SEQ ID NO:225), DOM4-130-11 (SEQ ID NO:226), DOM4-130-12 (SEQ ID NO:227), DOM4-130-13 (SEQ ID NO:228), DOM4-130-14 (SEQ ID NO:229), DOM4-130-15 (SEQ ID NO:230), DOM4-130-16 (SEQ ID NO:231), DOM4-130-17 (SEQ ID NO:232), DOM4-130-18 (SEQ ID NO:233), DOM4-130-19 (SEQ ID NO:234), DOM4-130-20 (SEQ ID NO:235), DOM4-130-21 (SEQ ID NO:236), DOM4-130-22 (SEQ ID NO:237), DOM4-130-23 (SEQ ID NO:238), DOM4-130-24 (SEQ ID NO:239), DOM4-130-25 (SEQ ID NO:240), DOM4-130-26 (SEQ ID NO:241), DOM4-130-27 (SEQ ID NO:242), DOM4-130-28 (SEQ ID NO:243), DOM4-130-31 (SEQ ID NO:244), DOM4-130-32 (SEQ ID NO:245), DOM4-130-33 (SEQ ID NO:246), DOM4-130-34 (SEQ ID NO:247), DOM4-130-35 (SEQ ID NO:248), DOM4-130-36 (SEQ ID NO:249), DOM4-130-37 (SEQ ID NO:250), DOM4-130-38 (SEQ ID NO:251), DOM4-130-39 (SEQ ID NO:252), DOM4-130-40 (SEQ ID NO:253), DOM4-130-41 (SEQ ID NO:254), DOM4-130-42 (SEQ ID NO:255), DOM4-130-43 (SEQ ID NO:256), DOM4-130-44 (SEQ ID NO:257), DOM4-130-45 (SEQ ID NO:258), DOM4-130-46 (SEQ ID NO:259), DOM4-130-47 (SEQ ID NO:260), DOM4-130-48 (SEQ ID NO:261), DOM4-130-49 (SEQ ID NO:262), DOM4-130-50 (SEQ ID NO:263), DOM4-130-51 (SEQ ID NO:264), DOM4-130-52 (SEQ ID NO:265), DOM4-130-53 (SEQ ID NO:266), DOM4-130-54 (SEQ ID NO:267), DOM4-130-55 (SEQ ID NO:268), DOM4-130-56 (SEQ ID NO:269), DOM4-130-57 (SEQ ID NO:270), DOM4-130-58 (SEQ ID NO:271), DOM4-130-59 (SEQ ID NO:272), DOM4-130-60 (SEQ ID NO:273), DOM4-130-61 (SEQ ID NO:274), DOM4-130-62 (SEQ ID NO:275), DOM4-130-63 (SEQ ID NO:276), DOM4-130-64 (SEQ ID NO:277), DOM4-130-65 (SEQ ID NO:278), DOM4-130-66 (SEQ ID NO:279), DOM4-130-67 (SEQ ID NO:280), DOM4-130-68 (SEQ ID NO:281), DOM4-130-69 (SEQ ID NO:282), DOM4-130-70 (SEQ ID NO:283), DOM4-130-71 (SEQ ID NO:284), DOM4-130-72 (SEQ ID NO:285), DOM4-130-73 (SEQ ID NO:286), DOM4-130-74 (SEQ ID NO:287), DOM4-130-75 (SEQ ID NO:288), DOM4-130-76 (SEQ ID NO:289), DOM4-130-77 (SEQ ID NO:290), DOM4-130-78 (SEQ ID NO:291), DOM4-130-79 (SEQ ID NO:292), DOM4-130-80 (SEQ ID NO:293), DOM4-130-81 (SEQ ID NO:294), DOM4-130-82 (SEQ ID NO:295), DOM4-130-83 (SEQ ID NO:296), DOM4-130-84 (SEQ ID NO:297), DOM4-130-85 (SEQ ID NO:298), DOM4-130-86 (SEQ ID NO:299), DOM4-130-87 (SEQ ID NO:300), DOM4-130-88 (SEQ ID NO:301), DOM4-130-89 (SEQ ID NO:302), DOM4-130-90 (SEQ ID NO:303), DOM4-130-91 (SEQ ID NO:304), DOM4-130-92 (SEQ ID NO:305), DOM4-130-93 (SEQ ID NO:306), DOM4-130-94 (SEQ ID NO:307), DOM4-130-95 (SEQ ID NO:308), DOM4-130-96 (SEQ ID NO:309), DOM4-130-97 (SEQ ID NO:310), DOM4-130-98 (SEQ ID NO:311), DOM4-130-99 (SEQ ID NO:312), DOM4-130-100 (SEQ ID NO:313), DOM4-130-101 (SEQ ID NO:314), DOM4-130-102 (SEQ ID NO:315), DOM4-130-103 (SEQ ID NO:316), DOM4-130-104 (SEQ ID NO:317), DOM4-130-105 (SEQ ID NO:318), DOM4-130-106 (SEQ ID NO:319), DOM4-130-107 (SEQ ID NO:320), DOM4-130-108 (SEQ ID NO:321), DOM4-130-109 (SEQ ID NO:322), DOM4-130-110 (SEQ ID NO:323), DOM4-130-111 (SEQ ID NO:324), DOM4-130-112 (SEQ ID NO:325), DOM4-130-113 (SEQ ID NO:326), DOM4-130-114 (SEQ ID NO:327), DOM4-130-115 (SEQ ID NO:328), DOM4-130-116 (SEQ ID NO:329), DOM4-130-117 (SEQ ID NO:330), DOM4-130-118 (SEQ ID NO:331), DOM4-130-119 (SEQ ID NO:332), DOM4-130-120 (SEQ ID NO:333), DOM4-130-121 (SEQ ID NO:334), DOM4-130-122 (SEQ ID NO:335), DOM4-130-123 (SEQ ID NO:336), DOM4-130-124 (SEQ ID NO:337), DOM4-130-125 (SEQ ID NO:338), DOM4-130-126 (SEQ ID NO:339), DOM4-130-127 (SEQ ID NO:340), DOM4-130-128 (SEQ ID NO:341), DOM4-130-129 (SEQ ID NO:342), DOM4-130-130 (SEQ ID NO:343), DOM4-130-131 (SEQ ID NO:344), DOM4-130-132 (SEQ ID NO:345), and DOM4-130-133 (SEQ ID NO:346).

13. The dAb monomer of claim 12, wherein said immunoglobulin single variable domain comprises an amino acid sequence that has at least about 90% amino acid sequence identity with the amino acid sequence of a dAb selected from the group consisting of DOM4-130-30 (SEQ ID NO:3), DOM4-130-46 (SEQ ID NO:4), DOM4-130-51 (SEQ ID NO:5), DOM4-130-53 (SEQ ID NO:6), DOM4-130-54 (SEQ ID NO:7), DOM4-130 (SEQ ID NO:215), DOM4-130-1 (SEQ ID NO:216), DOM4-130-2 (SEQ ID NO:217), DOM4-130-3 (SEQ ID NO:218), DOM4-130-4 (SEQ ID NO:219), DOM4-130-5 (SEQ ID NO:220), DOM4-130-6 (SEQ ID NO:221), DOM4-130-7 (SEQ ID NO:222), DOM4-130-8 (SEQ ID NO:223), DOM4-130-9 (SEQ ID NO:224), DOM4-130-10 (SEQ ID NO:225), DOM4-130-11 (SEQ ID NO:226), DOM4-130-12 (SEQ ID NO:227), DOM4-130-13 (SEQ ID NO:228), DOM4-130-14 (SEQ ID NO:229), DOM4-130-15 (SEQ ID NO:230), DOM4-130-16 (SEQ ID NO:231), DOM4-130-17 (SEQ ID NO:232), DOM4-130-18 (SEQ ID NO:233), DOM4-130-19 (SEQ ID NO:234), DOM4-130-20 (SEQ ID NO:235), DOM4-130-21 (SEQ ID NO:236), DOM4-130-22 (SEQ ID NO:237), DOM4-130-23 (SEQ ID NO:238), DOM4-130-24 (SEQ ID NO:239), DOM4-130-25 (SEQ ID NO:240), DOM4-130-26 (SEQ ID NO:241), DOM4-130-27 (SEQ ID NO:242), DOM4-130-28 (SEQ ID NO:243), DOM4-130-31 (SEQ ID NO:244), DOM4-130-32 (SEQ ID NO:245), DOM4-130-33 (SEQ ID NO:246), DOM4-130-34 (SEQ ID NO:247), DOM4-130-35 (SEQ ID NO:248), DOM4-130-36 (SEQ ID NO:249), DOM4-130-37 (SEQ ID NO:250), DOM4-130-38 (SEQ ID NO:251), DOM4-130-39 (SEQ ID NO:252), DOM4-130-40 (SEQ ID NO:253), DOM4-130-41 (SEQ ID NO:254), DOM4-130-42 (SEQ ID NO:255), DOM4-130-43 (SEQ ID NO:256), DOM4-130-44 (SEQ ID NO:257), DOM4-130-45 (SEQ ID NO:258), DOM4-130-46 (SEQ ID NO:259), DOM4-130-47 (SEQ ID NO:260), DOM4-130-48 (SEQ ID NO:261), DOM4-130-49 (SEQ ID NO:262), DOM4-130-50 (SEQ ID NO:263), DOM4-130-51 (SEQ ID NO:264), DOM4-130-52 (SEQ ID NO:265), DOM4-130-53 (SEQ ID NO:266), DOM4-130-54 (SEQ ID NO:267), DOM4-130-55 (SEQ ID NO:268), DOM4-130-56 (SEQ ID NO:269), DOM4-130-57 (SEQ ID NO:270), DOM4-130-58 (SEQ ID NO:271), DOM4-130-59 (SEQ ID NO:272), DOM4-130-60 (SEQ ID NO:273), DOM4-130-61 (SEQ ID NO:274), DOM4-130-62 (SEQ ID NO:275), DOM4-130-63 (SEQ ID NO:276), DOM4-130-64 (SEQ ID NO:277), DOM4-130-65 (SEQ ID NO:278), DOM4-130-66 (SEQ ID NO:279), DOM4-130-67 (SEQ ID NO:280), DOM4-130-68 (SEQ ID NO:281), DOM4-130-69 (SEQ ID NO:282), DOM4-130-70 (SEQ ID NO:283), DOM4-130-71 (SEQ ID NO:284), DOM4-130-72 (SEQ ID NO:285), DOM4-130-73 (SEQ ID NO:286), DOM4-130-74 (SEQ ID NO:287), DOM4-130-75 (SEQ ID NO:288), DOM4-130-76 (SEQ ID NO:289), DOM4-130-77 (SEQ ID NO:290), DOM4-130-78 (SEQ ID NO:291), DOM4-130-79 (SEQ ID NO:292), DOM4-130-80 (SEQ ID NO:293), DOM4-130-81 (SEQ ID NO:294), DOM4-130-82 (SEQ ID NO:295), DOM4-130-83 (SEQ ID NO:296), DOM4-130-84 (SEQ ID NO:297), DOM4-130-85 (SEQ ID NO:298), DOM4-130-86 (SEQ ID NO:299), DOM4-130-87 (SEQ ID NO:300), DOM4-130-88 (SEQ ID NO:301), DOM4-130-89 (SEQ ID NO:302), DOM4-130-90 (SEQ ID NO:303), DOM4-130-91 (SEQ ID NO:304), DOM4-130-92 (SEQ ID NO:305), DOM4-130-93 (SEQ ID NO:306), DOM4-130-94 (SEQ ID NO:307), DOM4-130-95 (SEQ ID NO:308), DOM4-130-96 (SEQ ID NO:309), DOM4-130-97 (SEQ ID NO:310), DOM4-130-98 (SEQ ID NO:311), DOM4-130-99 (SEQ ID NO:312), DOM4-130-100 (SEQ ID NO:313), DOM4-130-101 (SEQ ID NO:314), DOM4-130-102 (SEQ ID NO:315), DOM4-130-103 (SEQ ID NO:316), DOM4-130-104 (SEQ ID NO:317), DOM4-130-105 (SEQ ID NO:318), DOM4-130-106 (SEQ ID NO:319), DOM4-130-107 (SEQ ID NO:320), DOM4-130-108 (SEQ ID NO:321), DOM4-130-109 (SEQ ID NO:322), DOM4-130-110 (SEQ ID NO:323), DOM4-130-111 (SEQ ID NO:324), DOM4-130-112 (SEQ ID NO:325), DOM4-130-113 (SEQ ID NO:326), DOM4-130-114 (SEQ ID NO:327), DOM4-130-115 (SEQ ID NO:328), DOM4-130-116 (SEQ ID NO:329), DOM4-130-117 (SEQ ID NO:330), DOM4-130-118 (SEQ ID NO:331), DOM4-130-119 (SEQ ID NO:332), DOM4-130-120 (SEQ ID NO:333), DOM4-130-121 (SEQ ID NO:334), DOM4-130-122 (SEQ ID NO:335), DOM4-130-123 (SEQ ID NO:336), DOM4-130-124 (SEQ ID NO:337), DOM4-130-125 (SEQ ID NO:338), DOM4-130-126 (SEQ ID NO:339), DOM4-130-127 (SEQ ID NO:340), DOM4-130-128 (SEQ ID NO:341), DOM4-130-129 (SEQ ID NO:342), DOM4-130-130 (SEQ ID NO:343), DOM4-130-131 (SEQ ID NO:344), DOM4-130-132 (SEQ ID NO:345), and DOM4-130-133 (SEQ ID NO:346).

14. The dAb monomer of claim 1, wherein said dAb binds human IL-1R1 with an affinity (KD) of about 300 nM to about 5 pM, as determined by surface plasmon resonance.

15. A ligand comprising a dAb monomer according to claim 1, and a half-life extending moiety.

16. The ligand of claim 15, wherein said half-life extending moiety is a polyalkylene glycol moiety, serum albumin or a fragment thereof, transferrin receptor or a transferrin-binding portion thereof, or an antibody or antibody fragment comprising a binding site for a polypeptide that enhances half-life in vivo.

17. The ligand of claim 15, wherein said half-life extending moiety is a polyethylene glycol moiety.

18. The ligand of claim 16, wherein said half-life extending moiety is an antibody or antibody fragment comprising a binding site for serum albumin or neonatal Fc receptor.

19. The ligand of claim 18, wherein said antibody or antibody fragment is an antibody fragment, and said antibody fragment is an immunoglobulin single variable domain.

20. The ligand of claim 19, wherein said immunoglobulin single variable domain competes for binding to human serum albumin with a dAb selected from the group consisting of DOM7m-16 (SEQ ID NO:723), DOM7m-12 (SEQ ID NO:724), DOM7m-26 (SEQ ID NO:725), DOM7r-1 (SEQ ID NO:726), DOM7r-3 (SEQ ID NO:727), DOM7r-4 (SEQ ID NO:728), DOM7r-5 (SEQ ID NO:729), DOM7r-7 (SEQ ID NO:730), DOM7r-8 (SEQ ID NO:731), DOM7h-2 (SEQ ID NO:732), DOM7h-3 (SEQ ID NO:733), DOM7h-4 (SEQ ID NO:734), DOM7h-6 (SEQ ID NO:735), DOM7h-1 (SEQ ID NO:736), DOM7h-7 (SEQ ID NO:737), DOM7h-8 (SEQ ID NO:746), DOM7r-13 (SEQ ID NO:747), DOM7r-14 (SEQ ID NO:748), DOM7h-22 (SEQ ID NO:739), DOM7h-23 (SEQ ID NO:740), DOM7h-24 (SEQ ID NO:741), DOM7h-25 (SEQ ID NO:742), DOM7h-26 (SEQ ID NO:743), DOM7h-21 (SEQ ID NO:744), DOM7h-27 (SEQ ID NO:745), DOM7r-15 (SEQ ID NO:749), DOM7r-16 (SEQ ID NO:750), DOM7r-17 (SEQ ID NO:751), DOM7r-18 (SEQ ID NO:752), DOM7r-19 (SEQ ID NO:753), DOM7r-20 (SEQ ID NO:754), DOM7r-21 (SEQ ID NO:755), DOM7r-22 (SEQ ID NO:756), DOM7r-23 (SEQ ID NO:757), DOM7r-24 (SEQ ID NO:758), DOM7r-25 (SEQ ID NO:759), DOM7r-26 (SEQ ID NO:760), DOM7r-27 (SEQ ID NO:761), DOM7r-28 (SEQ ID NO:762), DOM7r-29 (SEQ ID NO:763), DOM7r-30 (SEQ ID NO:764), DOM7r-31 (SEQ ID NO:765), DOM7r-32 (SEQ ID NO:766), and DOM7r-33 (SEQ ID NO:767).

21. The ligand of claim 20, wherein said immunoglobulin single variable domain binds human serum albumin comprises an amino acid sequence that has at least 90% amino acid sequence identity with the amino acid sequence of a dAb selected from the group consisting of DOM7m-16 (SEQ ID NO:723), DOM7m-12 (SEQ ID NO:724), DOM7m-26 (SEQ ID NO:725), DOM7r-1 (SEQ ID NO:726), DOM7r-3 (SEQ ID NO:727), DOM7r-4 (SEQ ID NO:728), DOM7r-5 (SEQ ID NO:729), DOM7r-7 (SEQ ID NO:730), DOM7r-8 (SEQ ID NO:731), DOM7h-2 (SEQ ID NO:732), DOM7h-3 (SEQ ID NO:733), DOM7h-4 (SEQ ID NO:734), DOM7h-6 (SEQ ID NO:735), DOM7h-1 (SEQ ID NO:736), DOM7h-7 (SEQ ID NO:737), DOM7h-8 (SEQ ID NO:746), DOM7r-13 (SEQ ID NO:747), DOM7r-14 (SEQ ID NO:748), DOM7h-22 (SEQ ID NO:739), DOM7h-23 (SEQ ID NO:740), DOM7h-24 (SEQ ID NO:741), DOM7h-25 (SEQ ID NO:742), DOM7h-26 (SEQ ID NO:743), DOM7h-21 (SEQ ID NO:744), DOM7h-27 (SEQ ID NO:745), DOM7r-15 (SEQ ID NO:749), DOM7r-16 (SEQ ID NO:750), DOM7r-17 (SEQ ID NO:751), DOM7r-18 (SEQ ID NO:752), DOM7r-19 (SEQ ID NO:753), DOM7r-20 (SEQ ID NO:754), DOM7r-21 (SEQ ID NO:755), DOM7r-22 (SEQ ID NO:756), DOM7r-23 (SEQ ID NO:757), DOM7r-24 (SEQ ID NO:758), DOM7r-25 (SEQ ID NO:759), DOM7r-26 (SEQ ID NO:760), DOM7r-27 (SEQ ID NO:761), DOM7r-28 (SEQ ID NO:762), DOM7r-29 (SEQ ID NO:763), DOM7r-30 (SEQ ID NO:764), DOM7r-31 (SEQ ID NO:765), DOM7r-32 (SEQ ID NO:766), and DOM7r-33 (SEQ ID NO:767).

22. A ligand comprising a dAb monomer that has binding specificity for IL-1R1 and inhibits binding of IL-1 and IL-1ra to IL-1R1, wherein said dAb monomer is selected from the group consisting of DOM4-130-30 (SEQ ID NO:3), DOM4-130-46 (SEQ ID NO:4), DOM4-130-51 (SEQ ID NO:5), DOM4-130-53 (SEQ ID NO:6), and DOM4-130-54 (SEQ ID NO:7).

23. The ligand of claim 22, wherein said ligand is a dAb monomer.

24. The ligand of claim 22, wherein said ligand is a homodimer, homotrimer or homooligomer of said dAb monomer.

25. The ligand of claim 22, wherein said ligand is a heterodimer, heterotrimer or heterooligomer comprising at least two different dAb monomers selected from the group consisting of DOM4-130-30 (SEQ ID NO:3), DOM4-130-46 (SEQ ID NO:4), DOM4-130-51 (SEQ ID NO:5), DOM4-130-53 (SEQ ID NO:6), and DOM4-130-54 (SEQ ID NO:7).

26. The ligand of claim 22, further comprising a dAb monomer that binds serum albumin.

27. The ligand of claim 26, wherein said dAb monomer that binds serum albumin is DOM7h-8 (SEQ ID NO:746).

28. The ligand of claim 27, wherein said ligand comprises DOM4-130-54 (SEQ ID NO:7) and DOM7h-8 (SEQ ID NO:746).

29. A ligand comprising a dAb monomer that has binding specificity for IL-1R1 and inhibits binding of IL-1 and IL-1ra to IL-1R1, and a dAb monomer that has binding specificity for TNFR1.

30. The ligand of claim 29, wherein said dAb monomer that has binding specificity for IL-1R1 and inhibits binding of IL-1 and IL-1ra to IL-1R1 competes for binding to IL-1R1 with a dAb selected from the group consisting of DOM4-130-30 (SEQ ID NO:3), DOM4-130-46 (SEQ ID NO:4), DOM4-130-51 (SEQ ID NO:5), DOM4-130-53 (SEQ ID NO:6), DOM4-130-54 (SEQ ID NO:7), DOM4-130 (SEQ ID NO:215), DOM4-130-1 (SEQ ID NO:216), DOM4-130-2 (SEQ ID NO:217), DOM4-130-3 (SEQ ID NO:218), DOM4-130-4 (SEQ ID NO:219), DOM4-130-5 (SEQ ID NO:220), DOM4-130-6 (SEQ ID NO:221), DOM4-130-7 (SEQ ID NO:222), DOM4-130-8 (SEQ ID NO:223), DOM4-130-9 (SEQ ID NO:224), DOM4-130-10 (SEQ ID NO:225), DOM4-130-11 (SEQ ID NO:226), DOM4-130-12 (SEQ ID NO:227), DOM4-130-13 (SEQ ID NO:228), DOM4-130-14 (SEQ ID NO:229), DOM4-130-15 (SEQ ID NO:230), DOM4-130-16 (SEQ ID NO:231), DOM4-130-17 (SEQ ID NO:232), DOM4-130-18 (SEQ ID NO:233), DOM4-130-19 (SEQ ID NO:234), DOM4-130-20 (SEQ ID NO:235), DOM4-130-21 (SEQ ID NO:236), DOM4-130-22 (SEQ ID NO:237), DOM4-130-23 (SEQ ID NO:238), DOM4-130-24 (SEQ ID NO:239), DOM4-130-25 (SEQ ID NO:240), DOM4-130-26 (SEQ ID NO:241), DOM4-130-27 (SEQ ID NO:242), DOM4-130-28 (SEQ ID NO:243), DOM4-130-31 (SEQ ID NO:244), DOM4-130-32 (SEQ ID NO:245), DOM4-130-33 (SEQ ID NO:246), DOM4-130-34 (SEQ ID NO:247), DOM4-130-35 (SEQ ID NO:248), DOM4-130-36 (SEQ ID NO:249), DOM4-130-37 (SEQ ID NO:250), DOM4-130-38 (SEQ ID NO:251), DOM4-130-39 (SEQ ID NO:252), DOM4-130-40 (SEQ ID NO:253), DOM4-130-41 (SEQ ID NO:254), DOM4-130-42 (SEQ ID NO:255), DOM4-130-43 (SEQ ID NO:256), DOM4-130-44 (SEQ ID NO:257), DOM4-130-45 (SEQ ID NO:258), DOM4-130-46 (SEQ ID NO:259), DOM4-130-47 (SEQ ID NO:260), DOM4-130-48 (SEQ ID NO:261), DOM4-130-49 (SEQ ID NO:262), DOM4-130-50 (SEQ ID NO:263), DOM4-130-51 (SEQ ID NO:264), DOM4-130-52 (SEQ ID NO:265), DOM4-130-53 (SEQ ID NO:266), DOM4-130-54 (SEQ ID NO:267), DOM4-130-55 (SEQ ID NO:268), DOM4-130-56 (SEQ ID NO:269), DOM4-130-57 (SEQ ID NO:270), DOM4-130-58 (SEQ ID NO:271), DOM4-130-59 (SEQ ID NO:272), DOM4-130-60 (SEQ ID NO:273), DOM4-130-61 (SEQ ID NO:274), DOM4-130-62 (SEQ ID NO:275), DOM4-130-63 (SEQ ID NO:276), DOM4-130-64 (SEQ ID NO:277), DOM4-130-65 (SEQ ID NO:278), DOM4-130-66 (SEQ ID NO:279), DOM4-130-67 (SEQ ID NO:280), DOM4-130-68 (SEQ ID NO:281), DOM4-130-69 (SEQ ID NO:282), DOM4-130-70 (SEQ ID NO:283), DOM4-130-71 (SEQ ID NO:284), DOM4-130-72 (SEQ ID NO:285), DOM4-130-73 (SEQ ID NO:286), DOM4-130-74 (SEQ ID NO:287), DOM4-130-75 (SEQ ID NO:288), DOM4-130-76 (SEQ ID NO:289), DOM4-130-77 (SEQ ID NO:290), DOM4-130-78 (SEQ ID NO:291), DOM4-130-79 (SEQ ID NO:292), DOM4-130-80 (SEQ ID NO:293), DOM4-130-81 (SEQ ID NO:294), DOM4-130-82 (SEQ ID NO:295), DOM4-130-83 (SEQ ID NO:296), DOM4-130-84 (SEQ ID NO:297), DOM4-130-85 (SEQ ID NO:298), DOM4-130-86 (SEQ ID NO:299), DOM4-130-87 (SEQ ID NO:300), DOM4-130-88 (SEQ ID NO:301), DOM4-130-89 (SEQ ID NO:302), DOM4-130-90 (SEQ ID NO:303), DOM4-130-91 (SEQ ID NO:304), DOM4-130-92 (SEQ ID NO:305), DOM4-130-93 (SEQ ID NO:306), DOM4-130-94 (SEQ ID NO:307), DOM4-130-95 (SEQ ID NO:308), DOM4-130-96 (SEQ ID NO:309), DOM4-130-97 (SEQ ID NO:310), DOM4-130-98 (SEQ ID NO:311), DOM4-130-99 (SEQ ID NO:312), DOM4-130-100 (SEQ ID NO:313), DOM4-130-101 (SEQ ID NO:314), DOM4-130-102 (SEQ ID NO:315), DOM4-130-103 (SEQ ID NO:316), DOM4-130-104 (SEQ ID NO:317), DOM4-130-105 (SEQ ID NO:318), DOM4-130-106 (SEQ ID NO:319), DOM4-130-107 (SEQ ID NO:320), DOM4-130-108 (SEQ ID NO:321), DOM4-130-109 (SEQ ID NO:322), DOM4-130-110 (SEQ ID NO:323), DOM4-130-111 (SEQ ID NO:324), DOM4-130-112 (SEQ ID NO:325), DOM4-130-113 (SEQ ID NO:326), DOM4-130-114 (SEQ ID NO:327), DOM4-130-115 (SEQ ID NO:328), DOM4-130-116 (SEQ ID NO:329), DOM4-130-117 (SEQ ID NO:330), DOM4-130-118 (SEQ ID NO:331), DOM4-130-119 (SEQ ID NO:332), DOM4-130-120 (SEQ ID NO:333), DOM4-130-121 (SEQ ID NO:334), DOM4-130-122 (SEQ ID NO:335), DOM4-130-123 (SEQ ID NO:336), DOM4-130-124 (SEQ ID NO:337), DOM4-130-125 (SEQ ID NO:338), DOM4-130-126 (SEQ ID NO:339), DOM4-130-127 (SEQ ID NO:340), DOM4-130-128 (SEQ ID NO:341), DOM4-130-129 (SEQ ID NO:342), DOM4-130-130 (SEQ ID NO:343), DOM4-130-131 (SEQ ID NO:344), DOM4-130-132 (SEQ ID NO:345), and DOM4-130-133 (SEQ ID NO:346).

31. The ligand of claim 30, wherein said dAb monomer that has binding specificity for IL-1R1 and inhibits binding of IL-1 and IL-1ra to IL-1R1 comprises an amino acid sequence that has at least about 90% amino acid sequence identity with the amino acid sequence of a dAb selected from the group consisting of DOM4-130-30 (SEQ ID NO:3), DOM4-130-46 (SEQ ID NO:4), DOM4-130-51 (SEQ ID NO:5), DOM4-130-53 (SEQ ID NO:6), DOM4-130-54 (SEQ ID NO:7), DOM4-130 (SEQ ID NO:215), DOM4-130-1 (SEQ ID NO:216), DOM4-130-2 (SEQ ID NO:217), DOM4-130-3 (SEQ ID NO:218), DOM4-130-4 (SEQ ID NO:219), DOM4-130-5 (SEQ ID NO:220), DOM4-130-6 (SEQ ID NO:221), DOM4-130-7 (SEQ ID NO:222), DOM4-130-8 (SEQ ID NO:223), DOM4-130-9 (SEQ ID NO:224), DOM4-130-10 (SEQ ID NO:225), DOM4-130-11 (SEQ ID NO:226), DOM4-130-12 (SEQ ID NO:227), DOM4-130-13 (SEQ ID NO:228), DOM4-130-14 (SEQ ID NO:229), DOM4-130-15 (SEQ ID NO:230), DOM4-130-16 (SEQ ID NO:231), DOM4-130-17 (SEQ ID NO:232), DOM4-130-18 (SEQ ID NO:233), DOM4-130-19 (SEQ ID NO:234), DOM4-130-20 (SEQ ID NO:235), DOM4-130-21 (SEQ ID NO:236), DOM4-130-22 (SEQ ID NO:237), DOM4-130-23 (SEQ ID NO:238), DOM4-130-24 (SEQ ID NO:239), DOM4-130-25 (SEQ ID NO:240), DOM4-130-26 (SEQ ID NO:241), DOM4-130-27 (SEQ ID NO:242), DOM4-130-28 (SEQ ID NO:243), DOM4-130-31 (SEQ ID NO:244), DOM4-130-32 (SEQ ID NO:245), DOM4-130-33 (SEQ ID NO:246), DOM4-130-34 (SEQ ID NO:247), DOM4-130-35 (SEQ ID NO:248), DOM4-130-36 (SEQ ID NO:249), DOM4-130-37 (SEQ ID NO:250), DOM4-130-38 (SEQ ID NO:251), DOM4-130-39 (SEQ ID NO:252), DOM4-130-40 (SEQ ID NO:253), DOM4-130-41 (SEQ ID NO:254), DOM4-130-42 (SEQ ID NO:255), DOM4-130-43 (SEQ ID NO:256), DOM4-130-44 (SEQ ID NO:257), DOM4-130-45 (SEQ ID NO:258), DOM4-130-46 (SEQ ID NO:259), DOM4-130-47 (SEQ ID NO:260), DOM4-130-48 (SEQ ID NO:261), DOM4-130-49 (SEQ ID NO:262), DOM4-130-50 (SEQ ID NO:263), DOM4-130-51 (SEQ ID NO:264), DOM4-130-52 (SEQ ID NO:265), DOM4-130-53 (SEQ ID NO:266), DOM4-130-54 (SEQ ID NO:267), DOM4-130-55 (SEQ ID NO:268), DOM4-130-56 (SEQ ID NO:269), DOM4-130-57 (SEQ ID NO:270), DOM4-130-58 (SEQ ID NO:271), DOM4-130-59 (SEQ ID NO:272), DOM4-130-60 (SEQ ID NO:273), DOM4-130-61 (SEQ ID NO:274), DOM4-130-62 (SEQ ID NO:275), DOM4-130-63 (SEQ ID NO:276), DOM4-130-64 (SEQ ID NO:277), DOM4-130-65 (SEQ ID NO:278), DOM4-130-66 (SEQ ID NO:279), DOM4-130-67 (SEQ ID NO:280), DOM4-130-68 (SEQ ID NO:281), DOM4-130-69 (SEQ ID NO:282), DOM4-130-70 (SEQ ID NO:283), DOM4-130-71 (SEQ ID NO:284), DOM4-130-72 (SEQ ID NO:285), DOM4-130-73 (SEQ ID NO:286), DOM4-130-74 (SEQ ID NO:287), DOM4-130-75 (SEQ ID NO:288), DOM4-130-76 (SEQ ID NO:289), DOM4-130-77 (SEQ ID NO:290), DOM4-130-78 (SEQ ID NO:291), DOM4-130-79 (SEQ ID NO:292), DOM4-130-80 (SEQ ID NO:293), DOM4-130-81 (SEQ ID NO:294), DOM4-130-82 (SEQ ID NO:295), DOM4-130-83 (SEQ ID NO:296), DOM4-130-84 (SEQ ID NO:297), DOM4-130-85 (SEQ ID NO:298), DOM4-130-86 (SEQ ID NO:299), DOM4-130-87 (SEQ ID NO:300), DOM4-130-88 (SEQ ID NO:301), DOM4-130-89 (SEQ ID NO:302), DOM4-130-90 (SEQ ID NO:303), DOM4-130-91 (SEQ ID NO:304), DOM4-130-92 (SEQ ID NO:305), DOM4-130-93 (SEQ ID NO:306), DOM4-130-94 (SEQ ID NO:307), DOM4-130-95 (SEQ ID NO:308), DOM4-130-96 (SEQ ID NO:309), DOM4-130-97 (SEQ ID NO:310), DOM4-130-98 (SEQ ID NO:311), DOM4-130-99 (SEQ ID NO:312), DOM4-130-100 (SEQ ID NO:313), DOM4-130-101 (SEQ ID NO:314), DOM4-130-102 (SEQ ID NO:315), DOM4-130-103 (SEQ ID NO:316), DOM4-130-104 (SEQ ID NO:317), DOM4-130-105 (SEQ ID NO:318), DOM4-130-106 (SEQ ID NO:319), DOM4-130-107 (SEQ ID NO:320), DOM4-130-108 (SEQ ID NO:321), DOM4-130-109 (SEQ ID NO:322), DOM4-130-110 (SEQ ID NO:323), DOM4-130-111 (SEQ ID NO:324), DOM4-130-112 (SEQ ID NO:325), DOM4-130-113 (SEQ ID NO:326), DOM4-130-114 (SEQ ID NO:327), DOM4-130-115 (SEQ ID NO:328), DOM4-130-116 (SEQ ID NO:329), DOM4-130-117 (SEQ ID NO:330), DOM4-130-118 (SEQ ID NO:331), DOM4-130-119 (SEQ ID NO:332), DOM4-130-120 (SEQ ID NO:333), DOM4-130-121 (SEQ ID NO:334), DOM4-130-122 (SEQ ID NO:335), DOM4-130-123 (SEQ ID NO:336), DOM4-130-124 (SEQ ID NO:337), DOM4-130-125 (SEQ ID NO:338), DOM4-130-126 (SEQ ID NO:339), DOM4-130-127 (SEQ ID NO:340), DOM4-130-128 (SEQ ID NO:341), DOM4-130-129 (SEQ ID NO:342), DOM4-130-130 (SEQ ID NO:343), DOM4-130-131 (SEQ ID NO:344), DOM4-130-132 (SEQ ID NO:345), and DOM4-130-133 (SEQ ID NO:346).

32. The ligand of claim 29, wherein said dAb monomer that has binding specificity for TNFR1 competes for binding to TNFR1 with a dAb selected from the group consisting of TAR2h-12 (SEQ ID NO:785), TAR2h-13 (SEQ ID NO:786), TAR2h-14 (SEQ ID NO:787), TAR2h-16 (SEQ ID NO:788), TAR2h-17 (SEQ ID NO:789), TAR2h-18 (SEQ ID NO:790), TAR2h-19 (SEQ ID NO:791), TAR2h-20 (SEQ ID NO:792), TAR2h-21 (SEQ ID NO:793), TAR2h-22 (SEQ ID NO:794), TAR2h-23 (SEQ ID NO:795), TAR2h-24 (SEQ ID NO:796), TAR2h-25 (SEQ ID NO:797), TAR2h-26 (SEQ ID NO:798), TAR2h-27 (SEQ ID NO:799), TAR2h-29 (SEQ ID NO:800), TAR2h-30 (SEQ ID NO:801), TAR2h-32 (SEQ ID NO:802), TAR2h-33 (SEQ ID NO:803), TAR2h-10-1 (SEQ ID NO:804), TAR2h-10-2 (SEQ ID NO:805), TAR2h-10-3 (SEQ ID NO:806), TAR2h-10-4 (SEQ ID NO:807), TAR2h-10-5 (SEQ ID NO:808), TAR2h-10-6 (SEQ ID NO:809), TAR2h-10-7 (SEQ ID NO:810), TAR2h-10-8 (SEQ ID NO:811), TAR2h-10-9 (SEQ ID NO:812), TAR2h-10-10 (SEQ ID NO:813), TAR2h-10-11 (SEQ ID NO:814), TAR2h-10-12 (SEQ ID NO:815), TAR2h-10-13 (SEQ ID NO:816), TAR2h-10-14 (SEQ ID NO:817), TAR2h-10-15 (SEQ ID NO: 818), TAR2h-10-16 (SEQ ID NO: 819), TAR2h-10-17 (SEQ ID NO:820), TAR2h-10-18 (SEQ ID NO: 821), TAR2h-10-19 (SEQ ID NO: 822), TAR2h-10-20 (SEQ ID NO: 823), TAR2h-10-21 (SEQ ID NO: 824), TAR2h-10-22 (SEQ ID NO: 825), TAR2h-10-27 (SEQ ID NO:826), TAR2h-10-29 (SEQ ID NO:827), TAR2h-10-31 (SEQ ID NO:828), TAR2h-10-35 (SEQ ID NO:829), TAR2h-10-36 (SEQ ID NO:830), TAR2h-10-37 (SEQ ID NO:831), TAR2h-10-38 (SEQ ID NO:832), TAR2h-10-45 (SEQ ID NO:833), TAR2h-10-47 (SEQ ID NO:834), TAR2h-10-48 (SEQ ID NO:835), TAR2h-10-57 (SEQ ID NO:836), TAR2h-10-56 SEQ ID NO:837), TAR2h-10-58 (SEQ ID NO:838), TAR2h-10-66 (SEQ ID NO:839), TAR2h-10-64 (SEQ ID NO:840), TAR2h-10-65 (SEQ ID NO:841), TAR2h-10-68 (SEQ ID NO:842), TAR2h-10-69 (SEQ ID NO: 843), TAR2h-10-67 (SEQ ID NO: 844), TAR2h-10-61 (SEQ ID NO: 845), TAR2h-10-62 (SEQ ID NO:846), TAR2h-10-63 (SEQ ID NO:847), TAR2h-10-60 (SEQ ID NO:848), TAR2h-10-55 (SEQ ID NO:849), TAR2h-10-59 (SEQ ID NO:850), TAR2h-10-70 (SEQ ID NO:851), TAR2h-34 (SEQ ID NO:852), TAR2h-35 (SEQ ID NO:853), TAR2h-36 (SEQ ID NO:854), TAR2h-37 (SEQ ID NO:855), TAR2h-38 (SEQ ID NO:856), TAR2h-39 (SEQ ID NO:857), TAR2h-40 (SEQ ID NO:858), TAR2h-41 (SEQ ID NO:859), TAR2h-42 (SEQ ID NO:860), TAR2h-43 (SEQ ID NO:861), TAR2h-44 (SEQ ID NO:862), TAR2h-45 (SEQ ID NO:863), TAR2h-47 (SEQ ID NO:864), TAR2h-48 (SEQ ID NO:865), TAR2h-50 (SEQ ID NO:866), TAR2h-51 (SEQ ID NO:867), TAR2h-66 (SEQ ID NO:868), TAR2h-67 (SEQ ID NO:869), TAR2h-68 (SEQ ID NO:870), TAR2h-70 (SEQ ID NO:871), TAR2h-71 (SEQ ID NO:872), TAR2h-72 (SEQ ID NO:873), TAR2h-73 (SEQ ID NO:874), TAR2h-74 (SEQ ID NO:875), TAR2h-75 (SEQ ID NO:876), TAR2h-76 (SEQ ID NO:877), TAR2h-77 (SEQ ID NO:878), TAR2h-78 (SEQ ID NO:879), TAR2h-79 (SEQ ID NO:880), TAR2h-15 (SEQ ID NO:881), TAR2h-131-8 (SEQ ID NO:882), TAR2h-131-24 (SEQ ID NO:883), TAR2h-15-8 (SEQ ID NO:884), TAR2h-15-8-1 (SEQ ID NO:885), TAR2h-15-8-2 (SEQ ID NO:886), TAR2h-185-23 (SEQ ID NO:887), TAR2h-154-10-5 (SEQ ID NO:888), TAR2h-14-2 (SEQ ID NO:889), TAR2h-151-8 (SEQ ID NO:890), TAR2h-152-7 (SEQ ID NO:891), TAR2h-35-4 (SEQ ID NO:892), TAR2h-154-7 (SEQ ID NO: 893), TAR2h-80 (SEQ ID NO: 894), TAR2h-81 (SEQ ID NO: 895), TAR2h-82 (SEQ ID NO:896), TAR2h-83 (SEQ ID NO:897), TAR2h-84 (SEQ ID NO:898), TAR2h-85 (SEQ ID NO:899), TAR2h-86 (SEQ ID NO:900), TAR2h-87 (SEQ ID NO:901), TAR2h-88 (SEQ ID NO:902), TAR2h-89 (SEQ ID NO:903), TAR2h-90 (SEQ ID NO:904), TAR2h-91 (SEQ ID NO:905), TAR2h-92 (SEQ ID NO:906), TAR2h-93 (SEQ ID NO:907), TAR2h-94 (SEQ ID NO:908), TAR2h-95 (SEQ ID NO:909), TAR2h-96 (SEQ ID NO:910), TAR2h-97 (SEQ ID NO:911), TAR2h-99 (SEQ ID NO:912), TAR2h-100 (SEQ ID NO:913), TAR2h-101 (SEQ ID NO:914), TAR2h-102 (SEQ ID NO:915), TAR2h-103 (SEQ ID NO:916), TAR2h-104 (SEQ ID NO:917), TAR2h-105 (SEQ ID NO:918), TAR2h-106 (SEQ ID NO:919), TAR2h-107 (SEQ ID NO:920), TAR2h-108 (SEQ ID NO:921), TAR2h-109 (SEQ ID NO:922), TAR2h-110 (SEQ ID NO:923), TAR2h-111 (SEQ ID NO:924), TAR2h-112 (SEQ ID NO:925), TAR2h-13 (SEQ ID NO:926), TAR2h-14 (SEQ ID NO:927), TAR2h-15 (SEQ ID NO:928), TAR2h-16 (SEQ ID NO:929), TAR2h-117 (SEQ ID NO:930), TAR2h-118 (SEQ ID NO:931), TAR2h-119 (SEQ ID NO:932), TAR2h-120 (SEQ ID NO:933), TAR2h-121 (SEQ ID NO:934), TAR2h-122 (SEQ ID NO:935), TAR2h-123 (SEQ ID NO:936), TAR2h-124 (SEQ ID NO:937), TAR2h-125 (SEQ ID NO:938), TAR2h-126 (SEQ ID NO:939), TAR2h-127 (SEQ ID NO:940), TAR2h-128 (SEQ ID NO:941), TAR2h-129 (SEQ ID NO:942), TAR2h-130 (SEQ ID NO:943), TAR2h-131 (SEQ ID NO:944), TAR2h-132 (SEQ ID NO:945), TAR2h-133 (SEQ ID NO:946), TAR2h-151 (SEQ ID NO:947), TAR2h-152 (SEQ ID NO:948), TAR2h-153 (SEQ ID NO:949), TAR2h-154 (SEQ ID NO:950), TAR2h-159 (SEQ ID NO:951), TAR2h-165 (SEQ ID NO:952), TAR2h-166 (SEQ ID NO:953), TAR2h-168 (SEQ ID NO:954), TAR2h-171 (SEQ ID NO:955), TAR2h-172 (SEQ ID NO:956), TAR2h-173 (SEQ ID NO:957), TAR2h-174 (SEQ ID NO:958), TAR2h-176 (SEQ ID NO:959), TAR2h-178 (SEQ ID NO:960), TAR2h-201 (SEQ ID NO:961), TAR2h-202 (SEQ ID NO:962), TAR2h-203 (SEQ ID NO:963), TAR2h-204 (SEQ ID NO:964), TAR2h-185-25 (SEQ ID NO:965), TAR2h-154-10 SEQ ID NO:966), TAR2h-205 (SEQ ID NO:967), TAR2h-10 (SEQ ID NO:968), TAR2h-5 (SEQ ID NO:969), TAR2h-5d1 (SEQ ID NO:970), TAR2h-5d2 (SEQ ID NO:971), TAR2h-5d3 (SEQ ID NO:972), TAR2h-5d4 (SEQ ID NO:973), TAR2h-5d5 (SEQ ID NO:974), TAR2h-5d6 (SEQ ID NO:975), TAR2h-5d7 (SEQ ID NO:976), TAR2h-5d8 (SEQ ID NO:977), TAR2h-5d9 (SEQ ID NO:978), TAR2h-5d10 (SEQ ID NO:979), TAR2h-5d11 (SEQ ID NO:980), TAR2h-5d12 (SEQ ID NO:981), and TAR2h-5d13 (SEQ ID NO:982).

33. The ligand of claim 32, wherein said dAb monomer that has binding specificity for TNFR1 comprises an amino acid sequence that has at least about 90% amino acid sequence identity with the amino acid sequence of a dAb selected from the group consisting of TAR2h-12 (SEQ ID NO:785), TAR2h-13 (SEQ ID NO:786), TAR2h-14 (SEQ ID NO:787), TAR2h-16 (SEQ ID NO:788), TAR2h-17 (SEQ ID NO:789), TAR2h-18 (SEQ ID NO:790), TAR2h-19 (SEQ ID NO:791), TAR2h-20 (SEQ ID NO:792), TAR2h-21 (SEQ ID NO:793), TAR2h-22 (SEQ ID NO:794), TAR2h-23 (SEQ ID NO:795), TAR2h-24 (SEQ ID NO:796), TAR2h-25 (SEQ ID NO:797), TAR2h-26 (SEQ ID NO:798), TAR2h-27 (SEQ ID NO:799), TAR2h-29 (SEQ ID NO:800), TAR2h-30 (SEQ ID NO:801), TAR2h-32 (SEQ ID NO:802), TAR2h-33 (SEQ ID NO:803), TAR2h-10-1 (SEQ ID NO:804), TAR2h-10-2 (SEQ ID NO:805), TAR2h-10-3 (SEQ ID NO:806), TAR2h-10-4 (SEQ ID NO:807), TAR2h-10-5 (SEQ ID NO:808), TAR2h-10-6 (SEQ ID NO:809), TAR2h-10-7 (SEQ ID NO:810), TAR2h-10-8 (SEQ ID NO: 811), TAR2h-10-9 (SEQ ID NO: 812), TAR2h-10-10 (SEQ ID NO: 813), TAR2h-10-11 (SEQ ID NO:814), TAR2h-10-12 (SEQ ID NO:815), TAR2h-10-13 (SEQ ID NO: 816), TAR2h-10-14 (SEQ ID NO:817), TAR2h-10-15 (SEQ ID NO:818), TAR2h-10-16 (SEQ ID NO:819), TAR2h-10-17 (SEQ ID NO: 820), TAR2h-10-18 (SEQ ID NO: 821), TAR2h-10-19 (SEQ ID NO: 822), TAR2h-10-20 (SEQ ID NO: 823), TAR2h-10-21 (SEQ ID NO:824), TAR2h-10-22 (SEQ ID NO:825), TAR2h-10-27 (SEQ ID NO:826), TAR2h-10-29 (SEQ ID NO:827), TAR2h-10-31 (SEQ ID NO:828), TAR2h-10-35 (SEQ ID NO:829), TAR2h-10-36 (SEQ ID NO:830), TAR2h-10-37 (SEQ ID NO:831), TAR2h-10-38 (SEQ ID NO:832), TAR2h-10-45 (SEQ ID NO:833), TAR2h-10-47 (SEQ ID NO:834), TAR2h-10-48 (SEQ ID NO:835), TAR2h-10-57 (SEQ ID NO:836), TAR2h-10-56 SEQ ID NO:837), TAR2h-10-58 (SEQ ID NO:838), TAR2h-10-66 (SEQ ID NO:839), TAR2h-10-64 (SEQ ID NO:840), TAR2h-10-65 (SEQ ID NO: 841), TAR2h-10-68 (SEQ ID NO: 842), TAR2h-10-69 (SEQ ID NO: 843), TAR2h-10-67 (SEQ ID NO:844), TAR2h-10-61 (SEQ ID NO:845), TAR2h-10-62 (SEQ ID NO:846), TAR2h-10-63 (SEQ ID NO:847), TAR2h-10-60 (SEQ ID NO:848), TAR2h-10-55 (SEQ ID NO:849), TAR2h-10-59 (SEQ ID NO:850), TAR2h-10-70 (SEQ ID NO:851), TAR2h-34 (SEQ ID NO:852), TAR2h-35 (SEQ ID NO:853), TAR2h-36 (SEQ ID NO:854), TAR2h-37 (SEQ ID NO:855), TAR2h-38 (SEQ ID NO:856), TAR2h-39 (SEQ ID NO:857), TAR2h-40 (SEQ ID NO:858), TAR2h-41 (SEQ ID NO:859), TAR2h-42 (SEQ ID NO:860), TAR2h-43 (SEQ ID NO:861), TAR2h-44 (SEQ ID NO:862), TAR2h-45 (SEQ ID NO:863), TAR2h-47 (SEQ ID NO:864), TAR2h-48 (SEQ ID NO:865), TAR2h-50 (SEQ ID NO:866), TAR2h-51 (SEQ ID NO:867), TAR2h-66 (SEQ ID NO:868), TAR2h-67 (SEQ ID NO:869), TAR2h-68 (SEQ ID NO:870), TAR2h-70 (SEQ ID NO:871), TAR2h-71 (SEQ ID NO:872), TAR2h-72 (SEQ ID NO:873), TAR2h-73 (SEQ ID NO:874), TAR2h-74 (SEQ ID NO:875), TAR2h-75 (SEQ ID NO:876), TAR2h-76 (SEQ ID NO:877), TAR2h-77 (SEQ ID NO:878), TAR2h-78 (SEQ ID NO:879), TAR2h-79 (SEQ ID NO:880), TAR2h-15 (SEQ ID NO:881), TAR2h-131-8 (SEQ ID NO:882), TAR2h-131-24 (SEQ ID NO:883), TAR2h-15-8 (SEQ ID NO:884), TAR2h-15-8-1 (SEQ ID NO:885), TAR2h-15-8-2 (SEQ ID NO:886), TAR2h-185-23 (SEQ ID NO:887), TAR2h-154-10-5 (SEQ ID NO:888), TAR2h-14-2 (SEQ ID NO:889), TAR2h-151-8 (SEQ ID NO:890), TAR2h-152-7 (SEQ ID NO: 891), TAR2h-35-4 (SEQ ID NO: 892), TAR2h-154-7 (SEQ ID NO: 893), TAR2h-80 (SEQ ID NO:894), TAR2h-81 (SEQ ID NO:895), TAR2h-82 (SEQ ID NO:896), TAR2h-83 (SEQ ID NO:897), TAR2h-84 (SEQ ID NO:898), TAR2h-85 (SEQ ID NO:899), TAR2h-86 (SEQ ID NO:900), TAR2h-87 (SEQ ID NO:901), TAR2h-88 (SEQ ID NO:902), TAR2h-89 (SEQ ID NO:903), TAR2h-90 (SEQ ID NO:904), TAR2h-91 (SEQ ID NO:905), TAR2h-92 (SEQ ID NO:906), TAR2h-93 (SEQ ID NO:907), TAR2h-94 (SEQ ID NO:908), TAR2h-95 (SEQ ID NO:909), TAR2h-96 (SEQ ID NO:910), TAR2h-97 (SEQ ID NO:911), TAR2h-99 (SEQ ID NO: 912), TAR2h-100 (SEQ ID NO: 913), TAR2h-101 (SEQ ID NO:914), TAR2h-102 (SEQ ID NO:915), TAR2h-103 (SEQ ID NO:916), TAR2h-104 (SEQ ID NO:917), TAR2h-105 (SEQ ID NO:918), TAR2h-106 (SEQ ID NO:919), TAR2h-107 (SEQ ID NO:920), TAR2h-108 (SEQ ID NO:921), TAR2h-109 (SEQ ID NO:922), TAR2h-110 (SEQ ID NO:923), TAR2h-111 (SEQ ID NO:924), TAR2h-112 (SEQ ID NO:925), TAR2h-113 (SEQ ID NO:926), TAR2h-114 (SEQ ID NO:927), TAR2h-115 (SEQ ID NO:928), TAR2h-116 (SEQ ID NO:929), TAR2h-117 (SEQ ID NO:930), TAR2h-118 (SEQ ID NO:931), TAR2h-119 (SEQ ID NO:932), TAR2h-120 (SEQ ID NO:933), TAR2h-121 (SEQ ID NO:934), TAR2h-122 (SEQ ID NO:935), TAR2h-123 (SEQ ID NO:936), TAR2h-124 (SEQ ID NO:937), TAR2h-125 (SEQ ID NO:938), TAR2h-126 (SEQ ID NO:939), TAR2h-127 (SEQ ID NO:940), TAR2h-128 (SEQ ID NO:941), TAR2h-129 (SEQ ID NO:942), TAR2h-130 (SEQ ID NO:943), TAR2h-131 (SEQ ID NO:944), TAR2h-132 (SEQ ID NO:945), TAR2h-133 (SEQ ID NO:946), TAR2h-151 (SEQ ID NO:947), TAR2h-152 (SEQ ID NO:948), TAR2h-153 (SEQ ID NO:949), TAR2h-154 (SEQ ID NO:950), TAR2h-159 (SEQ ID NO:951), TAR2h-165 (SEQ ID NO:952), TAR2h-166 (SEQ ID NO:953), TAR2h-168 (SEQ ID NO:954), TAR2h-171 (SEQ ID NO:955), TAR2h-172 (SEQ ID NO:956), TAR2h-173 (SEQ ID NO:957), TAR2h-174 (SEQ ID NO:958), TAR2h-176 (SEQ ID NO:959), TAR2h-178 (SEQ ID NO:960), TAR2h-201 (SEQ ID NO:961), TAR2h-202 (SEQ ID NO:962), TAR2h-203 (SEQ ID NO:963), TAR2h-204 (SEQ ID NO:964), TAR2h-185-25 (SEQ ID NO:965), TAR2h-154-10 SEQ ID NO:966), TAR2h-205 (SEQ ID NO:967), TAR2h-10 (SEQ ID NO:968), TAR2h-5 (SEQ ID NO:969), TAR2h-5d1 (SEQ ID NO:970), TAR2h-5d2 (SEQ ID NO:971), TAR2h-5d3 (SEQ ID NO:972), TAR2h-5d4 (SEQ ID NO:973), TAR2h-5d5 (SEQ ID NO:974), TAR2h-5d6 (SEQ ID NO:975), TAR2h-5d7 (SEQ ID NO:976), TAR2h-5d8 (SEQ ID NO:977), TAR2h-5d9 (SEQ ID NO:978), TAR2h-5d10 (SEQ ID NO:979), TAR2h-5d11 (SEQ ID NO:980), TAR2h-5d12 (SEQ ID NO:981), and TAR2h-5d13 (SEQ ID NO:982).

34. The ligand of claim 29 further comprising a half-life extending moiety.

35. The ligand of claim 34, wherein said half-life extending moiety is a polyalkylene glycol moiety, serum albumin or a fragment thereof, transferrin receptor or a transferrin-binding portion thereof, or an antibody or antibody fragment comprising a binding site for a polypeptide that enhances half-life in vivo.

36. The ligand of claim 35, wherein said half-life extending moiety is a polyethylene glycol moiety.

37. The ligand of claim 35, wherein said half-life extending moiety is an antibody or antibody fragment comprising a binding site for serum albumin or neonatal Fc receptor.

38. The ligand of claim 37, wherein said antibody or antibody fragment is an antibody fragment, and said antibody fragment is an immunoglobulin single variable domain.

39. The ligand of claim 38, wherein said immunoglobulin single variable domain competes for binding to human serum albumin with a dAb selected from the group consisting of DOM7m-16 (SEQ ID NO:723), DOM7m-12 (SEQ ID NO:724), DOM7m-26 (SEQ ID NO:725), DOM7r-1 (SEQ ID NO:726), DOM7r-3 (SEQ ID NO:727), DOM7r-4 (SEQ ID NO:728), DOM7r-5 (SEQ ID NO:729), DOM7r-7 (SEQ ID NO:730), DOM7r-8 (SEQ ID NO:731), DOM7h-2 (SEQ ID NO:732), DOM7h-3 (SEQ ID NO:733), DOM7h-4 (SEQ ID NO:734), DOM7h-6 (SEQ ID NO:735), DOM7h-1 (SEQ ID NO:736), DOM7h-7 (SEQ ID NO:737), DOM7h-8 (SEQ ID NO:746), DOM7r-13 (SEQ ID NO:747), DOM7r-14 (SEQ ID NO:748), DOM7h-22 (SEQ ID NO:739), DOM7h-23 (SEQ ID NO:740), DOM7h-24 (SEQ ID NO:741), DOM7h-25 (SEQ ID NO:742), DOM7h-26 (SEQ ID NO:743), DOM7h-21 (SEQ ID NO:744), DOM7h-27 (SEQ ID NO:745), DOM7r-15 (SEQ ID NO:749), DOM7r-16 (SEQ ID NO:750), DOM7r-17 (SEQ ID NO:751), DOM7r-18 (SEQ ID NO:752), DOM7r-19 (SEQ ID NO:753), DOM7r-20 (SEQ ID NO:754), DOM7r-21 (SEQ ID NO:755), DOM7r-22 (SEQ ID NO:756), DOM7r-23 (SEQ ID NO:757), DOM7r-24 (SEQ ID NO:758), DOM7r-25 (SEQ ID NO:759), DOM7r-26 (SEQ ID NO:760), DOM7r-27 (SEQ ID NO:761), DOM7r-28 (SEQ ID NO:762), DOM7r-29 (SEQ ID NO:763), DOM7r-30 (SEQ ID NO:764), DOM7r-31 (SEQ ID NO:765), DOM7r-32 (SEQ ID NO:766), and DOM7r-33 (SEQ ID NO:767).

40. The ligand of claim 39, wherein said immunoglobulin single variable domain binds human serum albumin comprises an amino acid sequence that has at least 90% amino acid sequence identity with the amino acid sequence of a dAb selected from the group consisting of DOM7m-16 (SEQ ID NO:723), DOM7m-12 (SEQ ID NO:724), DOM7m-26 (SEQ ID NO:725), DOM7r-1 (SEQ ID NO:726), DOM7r-3 (SEQ ID NO:727), DOM7r-4 (SEQ ID NO:728), DOM7r-5 (SEQ ID NO:729), DOM7r-7 (SEQ ID NO:730), DOM7r-8 (SEQ ID NO:731), DOM7h-2 (SEQ ID NO:732), DOM7h-3 (SEQ ID NO:733), DOM7h-4 (SEQ ID NO:734), DOM7h-6 (SEQ ID NO:735), DOM7h-1 (SEQ ID NO:736), DOM7h-7 (SEQ ID NO:737), DOM7h-8 (SEQ ID NO:746), DOM7r-13 (SEQ ID NO:747), DOM7r-14 (SEQ ID NO:748), DOM7h-22 (SEQ ID NO:739), DOM7h-23 (SEQ ID NO:740), DOM7h-24 (SEQ ID NO:741), DOM7h-25 (SEQ ID NO:742), DOM7h-26 (SEQ ID NO:743), DOM7h-21 (SEQ ID NO:744), DOM7h-27 (SEQ ID NO:745), DOM7r-15 (SEQ ID NO:749), DOM7r-16 (SEQ ID NO:750), DOM7r-17 (SEQ ID NO:751), DOM7r-18 (SEQ ID NO:752), DOM7r-19 (SEQ ID NO:753), DOM7r-20 (SEQ ID NO:754), DOM7r-21 (SEQ ID NO:755), DOM7r-22 (SEQ ID NO:756), DOM7r-23 (SEQ ID NO:757), DOM7r-24 (SEQ ID NO:758), DOM7r-25 (SEQ ID NO:759), DOM7r-26 (SEQ ID NO:760), DOM7r-27 (SEQ ID NO:761), DOM7r-28 (SEQ ID NO:762), DOM7r-29 (SEQ ID NO:763), DOM7r-30 (SEQ ID NO:764), DOM7r-31 (SEQ ID NO:765), DOM7r-32 (SEQ ID NO:766), and DOM7r-33 (SEQ ID NO:767).

41. An isolated nucleic acid encoding a dAb monomer of claim 1.

42. A recombinant nucleic acid encoding a dAb monomer of claim 1.

43. A vector comprising a nucleic acid encoding a dAb monomer of claim 1.

44. The vector of claim 43, wherein said vector is an expression vector.

45. A host cell comprising a recombinant nucleic acid of claim 42.

46. A host cell comprising a vector of claim 43.

47. A method of producing a dAb monomer that has binding specificity for IL-1R1 and inhibits binding of IL-1 and IL-1ra to IL-1R1, comprising maintaining a host cell of claim 45 under conditions suitable for expression of said recombinant nucleic acid.

48. A method of producing a dAb monomer that has binding specificity for IL-1R1 and inhibits binding of IL-1 and IL-1ra to IL-1R1, comprising maintaining a host cell of claim 46 under conditions suitable for expression of said vector.

49. A pharmaceutical composition comprising a dAb monomer of claim 1 and a physiologically acceptable carrier.

50. The pharmaceutical composition of claim 49 wherein said composition is for intravenous, intramuscular, intraperitoneal, intraarterial, intrathecal delivery device, intraarticular, or subcutaneous administration.

51. The pharmaceutical composition of claim 49 wherein said composition is for pulmonary, intranasal delivery device, vaginal, or rectal administration.

52. A drug delivery device comprising the pharmaceutical composition of claim 49.

53. The drug delivery device of claim 52 wherein said drug delivery device is selected from the group consisting of a parenteral delivery device, intravenous delivery device, intramuscular delivery device, intraperitoneal delivery device, transdermal delivery device, pulmonary delivery device, intraarterial delivery device, intrathecal delivery device, intraarticular delivery device, subcutaneous delivery device, intranasal delivery device, vaginal delivery device, and rectal delivery device.

54. The drug delivery device of claim 53 wherein said device is selected from the group consisting of a syringe, a transdermal delivery device, a capsule, a tablet, a nebulizer, an inhaler, an atomizer, an aerosolizer, a mister, a dry powder inhaler, a metered dose inhaler, a metered dose sprayer, a metered dose mister, a metered dose atomizer, a catheter.

55. A method for treating an inflammatory disease comprising administering to a subject in need thereof a therapeutically effective amount of a dAb monomer of claim 1.

56. The method of claim 55 wherein said inflammatory disease is arthritis.

57-59. (canceled)

60. A method for treating an inflammatory disease, arthritis or respiratory disease comprising administering to a subject in need thereof a therapeutically effective amount of a domain antibody (dAb) monomer that is resistant to protease degradation.

61. The method of claim 60 wherein the dAb is administered via pulmonary administration.

62. The method of claim 60, wherein the dAb monomer is resistant to elastase.

63. The method of claim 60, wherein the dAb monomer is an immunoglobulin light chain variable domain.

64. The method of claim 63, wherein the dAb monomer is Vκ.

65. The method of claim 60, wherein the dAb has binding specificity for Interleukin-1 Receptor Type 1 (IL-1R1).

66. The method of claim 65, wherein the dAb monomer competes for binding to IL-1R1 with an anti-IL-1R1 dAb, wherein said anti-IL-1R1 dAb consists of an amino acid sequence selected from the group consisting of SEQ ID NO:1 through SEQ ID NO:349.

67. The method of claim 66, wherein the dAb monomer competes for binding to IL-1R1 with an anti-IL-1R1 dAb consisting of an amino acid selected from the group consisting of SEQ ID NO:3 through SEQ ID NO:7.

68. An isolated nucleic acid encoding a ligand of claim 29.

69. A recombinant nucleic acid encoding ligand of claim 29.

70. A vector comprising a nucleic acid encoding a ligand of claim 29.

71. The vector of claim 70, wherein said vector is an expression vector.

72. A host cell comprising a recombinant nucleic acid of claim 69.

73. A host cell comprising a vector of claim 70.

74. A method of producing a ligand that has binding specificity for IL-1R1 and inhibits binding of IL-1 and IL-1ra to IL-1R1, comprising maintaining a host cell of claim 72 under conditions suitable for expression of said recombinant nucleic acid.

75. A method of producing a ligand that has binding specificity for IL-1R1 and inhibits binding of IL-1 and IL-1ra to IL-1R1, comprising maintaining a host cell of 73 under conditions suitable for expression of said vector.

76. A pharmaceutical composition comprising a ligand of claim 29 and a physiologically acceptable carrier.

77. The pharmaceutical composition of claim 76 wherein said composition is for intravenous, intramuscular, intraperitoneal, intraarterial, intrathecal delivery device, intraarticular, or subcutaneous administration.

78. The pharmaceutical composition of claim 76 wherein said composition is for pulmonary, intranasal delivery device, vaginal, or rectal administration.

79. A drug delivery device comprising the pharmaceutical composition of claim 76.

80. The drug delivery device of claim 79 wherein said drug delivery device is selected from the group consisting of a parenteral delivery device, intravenous delivery device, intramuscular delivery device, intraperitoneal delivery device, transdermal delivery device, pulmonary delivery device, intraarterial delivery device, intrathecal delivery device, intraarticular delivery device, subcutaneous delivery device, intranasal delivery device, vaginal delivery device, and rectal delivery device.

81. The drug delivery device of claim 80 wherein said device is selected from the group consisting of a syringe, a transdermal delivery device, a capsule, a tablet, a nebulizer, an inhaler, an atomizer, an aerosolizer, a mister, a dry powder inhaler, a metered dose inhaler, a metered dose sprayer, a metered dose mister, a metered dose atomizer, a catheter.

82. A method for treating an inflammatory disease comprising administering to a subject in need thereof a therapeutically effective amount of a ligand of claim 29.

83. The method of claim 82 wherein said inflammatory disease is arthritis.

The application's sequence listing, which the Patent Office published only in electronic form, follows.

SEQUENCE LISTING (997 sequences)

SEQ ID NO: 1 - protein, 108 aa, Homo sapiens
DIQMTQSPSSLSASVGDRVTITCRASQWIGRELRWYQQKPGKAPMFLIYHASRLQRGVPSRFSGSGSGTDFTLTISSLQPEDFATYYCQQYHGWPLTFGQGTKVEIKR

SEQ ID NO: 2 - protein, 108 aa, Homo sapiens
DIQMTQSPSSLSASVGDRVTITCRASQWIGRELRWYQQKPGKAPKFLIYHASRLQRGVPSRFSGSGSGTDFTLTISSLQPEDFATYYCQQYHGWPLTFGQGTKVEIKR

SEQ ID NO: 3 - protein, 108 aa, Homo sapiens
DIQMTQSPSSLSASVGDRVTITCRASQDIYLNLDWYQQKPGKAPKLLIYGTSDLQSGVPSRFSGSGSGTDFTLTISSLQPEDFATYYCQPSFYFPYTFGQGTKVEIRR

SEQ ID NO: 4 - protein, 108 aa, Homo sapiens
DIQMTQSPSSLSASVGDRVTITCRASQDIYLNLDWYQQKPGKAPKLLINFGSELQSGVPSRFSGSGSGTDFTLTISSLQPEDFATYYCQPSFYFPYTFGQGTKVEIRR

SEQ ID NO: 5 - protein, 108 aa, Homo sapiens
DIQMTQSPSSLSASVGDRVTITCRASQDIYLNLDWYQQKPGKAPKLLINFGSELQSGVPSRFSGSGYGTDFTLTISSLQPEDFATYYCQPSFYFPYTFGQGTKVEIRR

SEQ ID NO: 6 - protein, 108 aa, Homo sapiens
DIQMTQSPSSLSASVGDRVTITCRASQDIYLNLDWYQQKPGKAPKLLINFGSELQSGVPSRFSGSGSGTDFTLTISSLQPEDFATYYCQPSFYFPYTFGQGTKVEIKR

SEQ ID NO: 7 - protein, 108 aa, Homo sapiens
DIQMTQSPSSLSASVGDRVTITCRASQDIYLNLDWYQQKPGKAPKLLINFGSELQSGVPSRFSGSGYGTDFTLTISSLQPEDFATYYCQPSFYFPYTFGQGTKVEIKR

SEQ ID NO: 8 - protein, 108 aa, Homo sapiens
DIQMTQSPSSLSASVGDRVTITCRASQSIYYFLHWYQQKPGKAPKLLIYRASSLQSGVPSRFSGSGSGTDFTLTISSLQPEDFATYYCQQVWRPPLTFGQGTKVEIKR

SEQ ID NO: 9 - protein, 108 aa, Homo sapiens
DIQMTQSPSSLSASVGDRVTITCRASQSIYQSLDWYQQKPGKAPKLLIYYASVLQSGVPSRFSGSGSGTDFTLTISSLQPEDFATYYCQQLSRPPFTFGQGTKVEIKR

SEQ ID NO: 10 - protein, 108 aa, Homo sapiens
DIQMTQSPSSLSTSVGDRVTITCRASQSIEEMLYWYQQKPGKAPKLLIYNASRLQSGVPSRFSGSGSGTDFILTISSLQPEDFATYYCRQVVGTPHTFGQGTKVEIKR

SEQ ID NO: 11 - protein, 108 aa, Homo sapiens
DIQMTQSPSSLSASVGDRVTITCRASQSIDDYLNWYQQKPGKAPKLLIYWASRLQSGVPSRFSGSGSGTDFTLTISSLQPEDFATYYCQQRWLTPSTFGQGTKVEIKR

SEQ ID NO: 12 - protein, 108 aa, Homo sapiens
DIQMTQSPSSLSASVGDRVTITCRASQSIEEMLYWYQQKPGKAPKLLIYNASRLQSGVPSRFSGSGSGTDFTLTISSLQPEDFATYYCRQVVGTPHTFGQGTKVEIKR

SEQ ID NO: 13 - protein, 108 aa, Homo sapiens
DIQMTQSPSSLSASVGDRVTITCRASQSIDDYLNWYQQKPGKAPKLLIYWASRLQSGVPSRFSGSGSGTDFTLTISSLQPEDFATYYCQQKWMGPHTFGQGTKVEIKR

SEQ ID NO: 14 - protein, 108 aa, Homo sapiens
DIQMTQSPSSLSASVGDRVTITCRASQNIDWGLDWYQQKPGKAPKLLIYMASRLQSGVPSRFSGSGSGTDFTLTISSLQPEDFATYYCQQLSMWPFTFGQGTKVEIKR

SEQ ID NO: 15 - protein, 108 aa, Homo sapiens
DIQMTQSPSSLSASVGDRVTITCRASQSILDYLSWYQQKPGKAPKLLIYWASKLQSGVPSRFSGSGSGTDFTLTISSLQPEDFATYYCQQKWMGPHTFGQGTKVEIKR

SEQ ID NO: 16 - protein, 108 aa, Homo sapiens
DIQMTQSPSSLSASVGDRVTITCRASQSISEYLYWYQQKPGKAPKLLIYHASTLQSGVPSRFSGSGSGTDFTLTISSLQPEDFATYYCRQYLRPPLTFGQGTKVEIKR

SEQ ID NO: 17 - protein, 108 aa, Homo sapiens
DIQMTQSPSSLSASVGDRVTITCRASQWIGVSLNWYQQKPGKAPKLLIYQSSLLQSGVPSRFSGSGSGTDFTLTISSLQPEDFATYYCQQVYIFPFTFGQGTKVEIKR

SEQ ID NO: 18 - protein, 108 aa, Homo sapiens
DIQMTQSPSSLSASVGDRVTITCRASQPIERWLYWYQQKPGKAPKLLIYGASELQSGVPSRFSGRGSGTDFTLTISSLQPEDFATYYCQQYHAYPFTFGQGTKVEIKR

SEQ ID NO: 19 - protein, 108 aa, Homo sapiens
DIQMTQSPSSLSASVGDRVTITCRASQNIEWYLNWYQQKPGKAPKLLIYGSSLLQSGVPSRFSGSGSGTDFTLTISSLQPEDFATYYCQQDWSSPFTFGQGTKVEIKR

SEQ ID NO: 20 - protein, 108 aa, Homo sapiens
DIQMTQSPSFLSASVGDRVTITCRASQVIGITLNWYQQKPGKAPKLLIYQGSLLQSGVPSRFSGSGSGTDFTLTINSLQPEDFATYYCQQSWQTPFTFGQGTKVEIKR

SEQ ID NO: 21 - protein, 108 aa, Homo sapiens
DIQMTQSPSSLSASVGDRVTITCRASQEIRAALQWYQQKPGKAPKLLIYQVSILQSGVPSRFSGSGSGTDFTLTISSLQPEDFATYYCQQSDRYPFTFGQGTKVEIKR

SEQ ID NO: 22 - protein, 108 aa, Homo sapiens
DIQMTQSPSSLSASVGDRVTITCRASQYIAEFLYWYQQKPGKAPKLLIYKASILQSGVPSRFSGSGSGTDFTLTISSLQPEDFATYYCQQYNAYPFTFGQGTKVEIKR

SEQ ID NO: 23 - protein, 108 aa, Homo sapiens
DIQMTQSPSSLSASVGDRVTITCRASQSINQVLNWYQQKPGKAPKLLIYQASLLQSGVPSRFSGSGSGTDFTLTISSLQPEDFATYYCQQFWGFPFTFGQGTKVEIKR

SEQ ID NO: 24 - protein, 108 aa, Homo sapiens
DIQMTQSPSSLSASVGDRVTITCRASQSIEHWLYWYQQKPGKAPKLLIYHASQLQSGVPSRFSGSGSGTDFTLTISSLQPEDFATYYCQQYHLPPMTFGQGTKVEIKR

SEQ ID NO: 25 - protein, 108 aa, Homo sapiens
DIQMTQSPSSLSASVGDRVTITCRASQSIKVYLRWYQQKPGKAPKLLIYKASLLQSGVPSRFSGSGSGTDFTLTISSLQPEDFATYYCQQDFDHPSTFGQGTKVEIKR

SEQ ID NO: 26 - protein, 108 aa, Homo sapiens
DIQMTQSPSSLSASVGDRVTITCRASQSIEFFLYWYQQKPGKTPKLLIYHASWLQSGVPSRFSGSGSGTDFTLTISSLQPEDFATYYCQQYFSYPLTFGQGTKVEIKR

SEQ ID NO: 27 - protein, 108 aa, Homo sapiens
DIQMTQSPSSLSASVEDRVTITCRASQSIYYFLHWYQQKPGKAPKLLIYRASSLQSGVPSRFSGSGSGTDFTLTISSLQPEDFATYYCQQVWRPPLTFGQGTKVEIKR

SEQ ID NO: 28 - protein, 108 aa, Homo sapiens
DIQMTQSPSSLSASVGDRVTITCRASQSITVELRWYQQKPGKAPKLLIYHASRLQSGVPSRFSGSGSGTDFTLTISSLQPEDFATYYCQQYATWPLTFGQGTKVEIKR

SEQ ID NO: 29 - protein, 108 aa, Homo sapiens
DIQMTQSPSSLSASVGDRVTITCRASQSIYLSLLWYQQKPGKTPKLLIYNASRLQSGVPSRFSGSGSGTDFTLTISSLQPEDFATYYCQQSWEWPFTFGQGTKVEIKR

SEQ ID NO: 30 - protein, 108 aa, Homo sapiens; identical to SEQ ID NO: 24

SEQ ID NO: 31 - protein, 108 aa, Homo sapiens
DIQMTQSPSSLSASVGDRVTITCRASQSISSYLNWYQQKPGKAPKLLIYGASILQSGVPSRFSGSGSGTDFTLTISSLQPEDFATYYCQQWVWLPITFGQGTKVEIKR

SEQ ID NO: 32 - protein, 108 aa, Homo sapiens
DIQMTQSPSSLSASVGDRVTITCRASQSIQQWLYWYQQKPGKAPKLLIYKASILQSGVPSRFSGSGSGTDFTLTISSLQPEDFATYYCQQYERYPFTFGQGTKVEIKR

SEQ ID NO: 33 - protein, 108 aa, Homo sapiens
DIQMTQSPSSLSASVGDRVTITCRASQSITHALKWYQQKPGKAPKLLIYKASFLQSGVPSRFSGSGSGTDFTLTISSLQPEDFATYYCQQSQLLPMTFGQGTKVEIKR

SEQ ID NO: 34 - protein, 108 aa, Homo sapiens
DIQMTQSPSSLSASVGDRVTITCRASQSIYNYLTWYQQKPGKAPKLLIYGASMLQSGVPSRFSGSGSGTDFTLTISSLQPEDFATYYCQQERSGPYTFGQGTKVEIKR

SEQ ID NO: 35 - protein, 108 aa, Homo sapiens
DIQMTQSPSSLSASVGDRVTITCRASQSISSYLNWYQQKPGKAPKLLIYFASRLQSGVPSRFSGSGSGTDFTLTISSLQPEDFATYYCQQNMLLPVTFGQGTKVEIKR

SEQ ID NO: 36 - protein, 108 aa, Homo sapiens
DIQMTQSPSSLSASVGDRVTITCRASQSIRHFLYWYQQKPGKAPKLLIYHASVLQSGVPSRFSGSGSGTDFTLTISSLQPEDFATYYCQQYGDLPFTFGQGTKVEIKR

SEQ ID NO: 37 - protein, 108 aa, Homo sapiens
DIQMTQSPPSLSASVGDRVTITCRASQSIGWWLYWYQQKPGKAPKLLIYHASRLQSGVPSRFSGSGSGTDFTLTISSLQPEDFATYYCQQYNSTPFTFGQGTKVEIKR

SEQ ID NO: 38 - protein, 108 aa, Homo sapiens
DIQMTQSPSSLSASVGDRVTITCRASQSIDRFLAWYQQKPGKAPKLLIYHASDLQSGVPSRFSGSGSGTDFTLTISSLQPEDFATYYCQQFDQWPFTFGQGTKVEIKR

SEQ ID NO: 39 - protein, 108 aa, Homo sapiens
DIQMTQSPSSLSASVGDRVTITCRASQSIKSRLAWYQQKPGKAPKLLIYKASLLQSGVPSRFSGSGSGTDFTLTISSLQPEDFATYYCQQYSRNPITFGQGTKVEIKR

SEQ ID NO: 40 - protein, 108 aa, Homo sapiens
DIQMTQSPSSLSASVGDRVTITCRASQSISRSLHWYQQKPGKAPKLLIYRASRLQSGVPSRFSGSGSGTDFTLTISSLQPEDFATYYCQQNRLRPHTFGQGTKVEIKR

SEQ ID NO: 41 - protein, 108 aa, Homo sapiens
DIQMTQSPSSLSASVGDRVTITCRASQSIKQFLYWYQQKPGKAPKLLIYQASYLQSGVPSRFSGSGSGTDFTLTISSLQPEDFATYYCQQYEVYPFTFGQGTKVEIKR

SEQ ID NO: 42 - protein, 108 aa, Homo sapiens
DIQMTQSPSSLSASVGDRVTITCRASQSIYHYLYWYQQKPGKAPKLLIYAASLLQSGVPSRFSGSGSGTDFTLTISSLQPEDFATYYCQQYQLYPFTFGQGTKVEIKR

SEQ ID NO: 43 - protein, 108 aa, Homo sapiens
DIQMTQSPSSLSASVGDRVTITCRASQSISSYLNWYQQKPGKAPKLLIYFASSLQSGVPSRFSGSGSGTDFTLTISSLQPEDFATYYCQQGWDVPYTFGQGTKVEIKR

SEQ ID NO: 44 - protein, 108 aa, Homo sapiens
DIQMTQSPSSLSASVGDRVTITCRASQSIDNWLRWYQQKPGKAPKLLIYSASFLQSGVPSRFSGSGSGTDFTLTISSLQPEDFATYYCQQGRSAPQTFGQGTKVEIKR

SEQ ID NO: 45 - protein, 108 aa, Homo sapiens
DIQMTQSPSSLSASVGDRVTITCRASQSIWYWLSWYQQKPGKAPKLLIYYASSLQSGVPSRFSGSGSGTDFTLTISSLQPEDFATYYCQQMSSTPFTFGQGTKVEIKR

SEQ ID NO: 46 - protein, 108 aa, Homo sapiens
DIQMTQSPSSLSASVGDRVTITCRASQSITMRLGWYQQKPGKAPKLLIYNASHLQSGVPSRFSGSGSGTDFTLTISSLQPEDFATYYCQQYFDYPTTFGQGTKVEIKR

SEQ ID NO: 47 - protein, 108 aa, Homo sapiens
DIQMTQSPSSLSASVGDRVTITCRASQSIHWLLSWYQQKPGKAPKLLIYAASSLQSGVPSRFSGSGSGTDFTLTISSLQPEDFATYYCQQNLARPFTFGQGTKVEIKR

SEQ ID NO: 48 - protein, 108 aa, Homo sapiens
DIQMTQSPSSLSASVGDRVTITCRASQSIGERLWWYQQKPGKAPKLLIYNSSVLQSGVPSRFSGSGSGTDFTLTISSLQPEDFATYYCQQSWRGPATFGQGTKVEIKR

SEQ ID NO: 49 - protein, 108 aa, Homo sapiens
DIQMTQSPSSLSASVGDRVTITCRASQDIDRALQWYQQKPGKAPKLLIYMSSVLQSGVPSRFSGSGSGTDFTLTISSLQPEDFATYYCQQQAGYPFTFGQGTKVEIKR

SEQ ID NO: 50 - protein, 108 aa, Homo sapiens
DIQMTQSPSSLSASVGDRVTITCRASQNIDRELRWYQQKPGKAPMLLIYHASRLQSGVPSRFSGSGSGTDFTLTISSLQPEDFATYYCQQYFTWPLTFGQGTKVEIKR

SEQ ID NO: 51 - protein, 108 aa, Homo sapiens
DIQMTQSPSSLSASVGDRVTITCRASQSISTSLQWYQQKPGKAPKLLIYSSSTLQSGVPSRFSGSGSGTDFTLTISSLQPEDFATYYCQQQWEYPFTFGQGTKVEIKR

SEQ ID NO: 52 - protein, 108 aa, Homo sapiens
DIQMTQSPSSLSASVGDRVTITCRASQNIGTALSWYQQKPGKAPKLLIYWASILQSGVPSRFSGSGSGTDFTLTISSLQPEDFATYYCQQTNSWPFTFGQGTKVEIKR

SEQ ID NO: 53 - protein, 108 aa, Homo sapiens
DIQMTQSPSSLSASVGDRVTITCRASQKIDDALQWYQQKPGKAPKLLIYLASHLQSGVPSRFSGSGSGTDFTLTISSLQPEDFATYYCQQQSNWPFTFGQGTKVEIKR

SEQ ID NO: 54 - protein, 108 aa, Homo sapiens
DIRMTQSPSSLSASVGDRVTITCRASQSIGRALQWYQQKPGKAPKLLIYQRSMLQSGVPSRFSGSGSGTDFTLTISSLQPEDFATYYCQQSYLWPFTFGQGTKVEIKR

SEQ ID NO: 55 - protein, 108 aa, Homo sapiens
DIQMTQSPSSLSASVGDRVTITCRASQEIGKELLWYQQKPGKAPKLLIYDVSVLQSGVPSRFSGSGSGTDFTLTISSLQPEDFATYYCQQYQSYPNTFGQGTKVEIKR

SEQ ID NO: 56 - protein, 108 aa, Homo sapiens
DIQMTQSPSSLSASVGDRVTITCRASQQIMRSLNWYQQKPGKAPKLLIYQSSILQSGVPSRFSGSGSGTDFTLTISSLQPEDFATYYCQQAWQYPFTFGQGTKVEIKR

SEQ ID NO: 57 - protein, 108 aa, Homo sapiens
DIQMTQSPSSLSASVGDRVTITCRASQDIQRRLAWYQQKPGKAPKLLIYNVSYLQSGVPSRFSGSGSGTDFTLTISSLQPEDFATYYCQQYNDYPTTFGQGTKVEIKR

SEQ ID NO: 58 - protein, 116 aa, Homo sapiens
EVQLLESGGGLVQPGGSLRLSCAASGFTFRMYQMYWVRQAPGKGLEWVSSISASGAGTYYADSVKGRFTISRDNSKNTLYLQMNSLRAEDTAVYYCAKAASSFDYWGQGTLVTVSS

SEQ ID NO: 59 - protein, 117 aa, Homo sapiens
EVQLLESGGGLVQPGGSLRLSCAASGFTFASYQMYWVRQAPGKGLEWVSTISPSGGGTYYADSVKGRFTISRDNSKNTLYLQMNSLRAEDTAVYYCAKKDTGTFDYWGQGTLVTVSS

SEQ ID NO: 60 - protein, 116 aa, Homo sapiens
EVQLLESGGGLVQPGGSLRLSCAASGFTFNKYSMGWVRQAPGKGLEWVSRISSSGGGTYYADSVKGRFTISRDNSKNTLYLQMNSLRAEDTAVYYCAKVANPFDYWGQGTLVTVSS

SEQ ID NO: 61 - protein, 124 aa, Homo sapiens
EVQLLESGGGLVQPGGSLRLSCAASGFTFNKYSMGWVRQAPGKGLEWVSRISSSGGGTYYADSVKGRFTISRDNSKNTLYLQMNSLRAEDTAVYYCAKEPDRSGYLTRVAFDYWGQGTLVTVSS

SEQ ID NO: 62 - protein, 123 aa, Homo sapiens
EVQLLESGGGLVQPGGSLRLSCAASGFTFETYQMWWVRQAPGKGLEWVSSISPSGSGTYYADSVKGRFTISRDNSKNTLYLQMNSLRAEDTAVYYCAKMCPRCRDVVSLFDYWGQGTLVTVSS

SEQ ID NO: 63 - protein, 121 aa, Homo sapiens
EVQLLESGGGLVQPGGSLRLSCAASGFTFSEYGMWWVRQAPGKGLEWVSGITATGKMTYYADSVKGRFTISRDNSKNTLYLQMNSLRAEDTAVYYCAKSSLPSGQGHFDYWGQGTLVTVSS

SEQ ID NO: 64 - protein, 122 aa, Homo sapiens
EVQLLESGGGLVQPGGSLRLSCAASGFTFREYQMSWARQAPGKGLEWVSTISASGSGTYYADSVKGRFTISRDNSKNTLYLQMNSLRAEDTAVYYCAKRFKISPVFSSFDYWGQGTLVTVSS

SEQ ID NO: 65 - protein, 122 aa, Homo sapiens
EVQLLESGGGLVQPGGSLRLSCAASGFTFAEYQMYWVRQAPGKGLEWVSSISVSGAGTYYADSVKGRFTISRDNSKNTLYLQMNSLRAEDTAVYYCAKSRNTLTDSHRFDYWGQGTLVTVSS

SEQ ID NO: 66 - protein, 124 aa, Homo sapiens
EVQLLESGGGLVQPGGSLRLSCAASGFTFTRYQMAWVRQAPGKGLEWVSSISSSGAGTYYADSVKGRFTISRDNSKNTLYLQMNSLRAEDTAVYYCAKWAANFSGNYRPKFDYWGQGTLVTVSS

SEQ ID NO: 67 - protein, 122 aa, Homo sapiens
EVQLLESGGGLVQPGGSLRLSCAASGFTFKDYTMTWVRQAPGKGLEWVSRISSSGAGTYYADSVKGRFTISRDNSKNTLYLQMNSLRAEDTAVYYCAKVGNSSRVSHTFDYWGQGTLVTVSS

SEQ ID NO: 68 - protein, 122 aa, Homo sapiens
EVQLLESGGGLVQPGGSLRLSCAASGFTFAQYSMGWVRQAPGKGLEWVSRISSSGSGTYYADSVKGRFTISRDNSKNTLYLQMNSLRAEDTAVYYCAKEGRPLTASLRFDYWGQGTLVTVSS

SEQ ID NO: 69 - protein, 119 aa, Homo sapiens
EVQLLESGGGLVRPGGSLRLSCAASGFTFRMYQMYWVRQAPGKGLEWVSSISASGAGTYYADSVKGRFTISRDNSKNTLYLQMNSLRAEDTAVYYCAKGMMPLSSFDYWGQGTLVTVSS

SEQ ID NO: 70 - protein, 119 aa, Homo sapiens
EVQLLESGGGLVQPGGSLRLSCAASGFTFGKYSMSWVRQAPGKGLEWVSSILDSGVFTYYADSVKGRFTISRDNSKNTLYLQMNSLRAEDTAVYYCAKNVSTPEGFDYWGQGTLVTVSS

SEQ ID NO: 71 - protein, 120 aa, Homo sapiens
EVQLLESGGGLVQPGGSLRLSCAASGFTFETYAMSWVRQAPGKGLEWVSSIGMHGRPTYYADSVKGRFTISRDNSKNTLYLQMNSLRAEDTAVYYCAKQKTSQSGAFDYWGQGTLVTVSS

SEQ ID NO: 72 - protein, 119 aa, Homo sapiens
EVQLLESGGGLVQPGGSLRLSCAASGFTFSSYTMEWVRQAPGKGLEWVSRISSSGAGTYYADSVKGRFTISRDNSRNTLYLQMNSLRAEDTAVYYCAKRTSLADVFDYWGQGTLVTVSS

SEQ ID NO: 73 - protein, 122 aa, Homo sapiens
EVQLLESGGGLVQPGGSLRLSCAASGFTFRAYAMAWVRQAPGKGLEWVSTISGTGDHTYYADSVKGRFTISRDNSKNTLYLQMNSLRAEDTAVYYCAKAHGNPVSDLSFDYWGQGTLVTVSS

SEQ ID NO: 74 - protein, 120 aa, Homo sapiens
EVQLLESGGGLVQPGGSLRLSCAASGFTFRRYDMSWVRQAPGKGLEWVSTISSTGRTTYYADSVKGRFTISRDNSKNTLYLQMNSLRAEDTAVYYCAKALETVSGAFDYWGQGTLVTVSS

SEQ ID NO: 75 - protein, 108 aa, Homo sapiens
DIQMTQSPSSLSASVGDRVTITCRASQNIGYSLDWYQQKPGKAPRLLIYFGSRLQSGVPSRFSGSGSGTDFTLTISSLQPEDFATYYCQQLLKPPFTFGQGTKVEIKR

SEQ ID NO: 76 - protein, 108 aa, Homo sapiens
DIQMTQSPSSLSASVGDRVTITCRASQRIGPSLLWYQQKPGKAPKLLIYNTSVLQSGVPSRFRGSGSGTDFTLTISSLQPEDFATYYCQQTWNYPFTFGQGTKVEIKR

SEQ ID NO: 77 - protein, 108 aa, Homo sapiens
DIQMTQSPSSLSASVGDRVTITCRASQNIESGLWWYQQKPGKAPKLLIYNSSFLQSGVPSRFSGSGSGTDFTLTISSLQPEDFATYYCQQPWQSPTTFGQGTKVEIKR

SEQ ID NO: 78 - protein, 108 aa, Homo sapiens
DIQMTQSPSSLSASVGDRVTITCRASQNIGQNLWWYQQKPGKAPKLLIYGSSKLQSGVPPRFSGSGSGTDFTLTISSLQPEDFATYYCQPAWQGPKTFGQGTKVEIKR

SEQ ID NO: 79 - protein, 108 aa, Homo sapiens
DIQMTQSPSSLSASVGDRVTITCRASQWISHRLMWYQQKPGKAPKLLIYRASELQSGVPSRFSGSGSGTDFTLTISSLQPEDFATYYCQQNARMPHTFGQGTKVEIKR

SEQ ID NO: 80 - protein, 108 aa, Homo sapiens
DIQMTQSPSSLSASVGDRVTITCRASQSIDTGLDWYQQKPGKAPKLLIYRVSTLQSGVPSRFSGSGSGTDFTLTISSLQPEDFATYYCQQLRRPPFTFGQGTKVEIKR

SEQ ID NO: 81 - protein, 108 aa, Homo sapiens
DIQMTQSPSSLSASVGDRVTITCRASQNIGSALQWYQQKPGKAPKLLIYQISKLQSGVPSRFSGSGSGTDFTLTISSLQPEDFATYYCQQNESWPFTFGQGTKVEIKR

SEQ ID NO: 82 - protein, 108 aa, Homo sapiens
DIQMTQSPSSLSASVGDRVTITCRANQRIESSLNWYQQKPGKAPKLLIYLSSILQSGVPSRFSGSGSGTDFTLTISSLQPEDFATYYCQQQWTYPFTFGQGTKVEIKR

SEQ ID NO: 83 - protein, 108 aa, Homo sapiens
DIQMTQSPSSLSASVGDRVTITCRASQNIGKSLDWYQQKPGKAPKLLIYLTSMLQSGVPSRFSGSGSGTDFTLTISSLQPEDFATYYCQQLQRPPFTFGQGTKVEIKR

SEQ ID NO: 84 - protein, 108 aa, Homo sapiens
DIQMTQSPSSLSASVGDRVTITCRASQSIGKWLYWYQQKPGKAPKLLIYESSLLQSGVPSRFSGSGSGTDFTLTISSLQPEDFATYYCQQYDIYPFTFGQGTKVEIKR

SEQ ID NO: 85 - protein, 108 aa, Homo sapiens
DIQMTQSPSSLSASVGDRVTITCQASQHIGEELLWYQQKPGKDPKLLIYSGSTLQSGVPSRFSGSGSGTDFTLTISSLQPEDFATYYCQQYLVWPNTFGQGTKVEIKR

SEQ ID NO: 86 - protein, 108 aa, Homo sapiens
DIQMTQSPSSLSASVGDRVTITCRASQNIKTSLLWYQQKPGKAPKLLIYWASRLQSGVPSRFSGSGSGTDFTLTISSLQPEDFATYYCQQTLDWPFTFGQGTKVEIKR

SEQ ID NO: 87 - protein, 108 aa, Homo sapiens
DIQMTQSPSSLSASVGDRVTITCRASQPIWYKLNWYQQKPGKAPKLLIYAASMLQSGVPSRFSGSGSGTDFTLTISSLQPEDFATYYCQQQLIHPYTFGQGTKVEIKR

SEQ ID NO: 88 - protein, 108 aa, Homo sapiens
DIQMTQSPSSLSASVGDRVTITCRASQDIDNNLWWYQQKPGKAPKLLIYSASLLQSGVPSRFSGSGSGTDFTLTISSLQPEDFATYYCQQAWTSPKTFGQGTKVEIKR

SEQ ID NO: 89 - protein, 108 aa, Homo sapiens
DIQMTQSPSSLSASVGDRVTITCRASQSISEYLYWYQQKPGKAPKLLIYHASVLQRGVPSRFSGSGSGTDFTLTISSLQPEDSATYYCQQYAFSPRTFGQGTKVEIKR

SEQ ID NO: 90 - protein, 108 aa, Homo sapiens
DIQMTQSPSSLSASVGDRVTITCRASQGIHISLQWYQQKPGKAPKLLIYQGSILQSGVPSRFSGSGSGTDFTLTISSLQPEDFATYYCQQQYHFPFTFGQGTKVEIKR

SEQ ID NO: 91 - protein, 108 aa, Homo sapiens
DIQMTQSPSSLSASVGDRVTITCRASQPILRALAWYQQKPGKAPKLLIYLSSHLQSGVPSRFSGSGSGTDFTLTISSLQPEDFATYYCQQRWVQPYTFGQGTTVEIKR

SEQ ID NO: 92 - protein, 108 aa, Homo sapiens
DIQMTQSPSSLSASVGDRVAITCRASQRIMKALNWYQQKPGKAPKLLIYQASLLQSGVPSRFSGGGSGTDFTLTISSLQPEDLATYYCQQTDVWPFTFGQGTKVEIKR

SEQ ID NO: 93 - protein, 108 aa, Homo sapiens
DIQMTQSPSSLSASVGDRVTITCRASQVIDRTLYWYQQKPGKAPKLLIYNVSFLQSGVPSRFSGSGSGTDFTLTISSLQPEDFATYYCQQYESKPYTFGQGTKVEIKR

SEQ ID NO: 94 - protein, 108 aa, Homo sapiens
DIQMTQSPSSLSASVGDRVTITCRASQPINTFLYWYQQKPGKAPRLLIYKSSILQSGVPSRFSGSGSGTDFTLTISSLQPEDFATYYCQQYNLYPFTFGQGTKVEIKR

SEQ ID NO: 95 - protein, 108 aa, Homo sapiens
DIQMTQSPSSLSASVGDRVTITCRASQNIDRELRWYQQKPGKAPMLLIYHASRLQSGVPSRFSGSGSGTDFTLTISSLQPEDFATYYCQQYANWPLTFGQGTKVEIKR

SEQ ID NO: 96 - protein, 108 aa, Homo sapiens
DIQMTQSPSSLSASVGDRVTITCRASQSIGRELRWYQQKPGKAPMFLIYHASRLQSGVPSRFSGSGSGTDFTLTISSLQPEDFATYYCQQYHSWPLTFGQGTKVEIKR

SEQ ID NO: 97 - protein, 108 aa, Homo sapiens
DIQMTQSPSSLSASVGDRVTITCRASQSIGRELRWYQQKPGKAPMFLIYHASRLQSGVPSRFSGSGSGTDFTLTISSLQPEDFATYYCQQYFHWPLTFGQGTKVEIKR

SEQ ID NO: 98 - protein, 108 aa, Homo sapiens
DIQMTQSPSSLSASVGDRVTITCRASQSIGRELRWYQQKPGKAPMFLIYHASRLQRGVPSRFSGSGSGTDFTLTISSLQPEDFATYYCQQYHSWPLTFGQGTKVEIKR

SEQ ID NO: 99 - protein, 108 aa, Homo sapiens
DIQMTQSPSSLSASVGDRVTITCRASQNIGRELRWYQQKPGKAPMFLIYHASRLQSGVPSRFSGSGSGTDFTLTISSLQPEDFATYYCQQYNSWPLTFGQGTKVEIKR

SEQ ID NO: 100 - protein, 108 aa, Homo sapiens
DIQMTQSPSSLSASVGDRVTITCRASQHIGVELRWYQQKPGEAPMFLIYHASRLQSGVPSRFSGSGSGTDFTLTISSLQPEDFATYYCQQYYGWPLTFGQGTKVEIKR

SEQ ID NO: 101 - protein, 108 aa, Homo sapiens
DIQMTQSPSSLSASVGDRVTITCRASQWIGRELRWYQQKPGKAPMFLIYHASRLQSGVPSRFSGSGSGTDFTLTISSLQPEDFATYYCQQYHGWPLTFGQGTKVEIKR

SEQ ID NO: 102 - protein, 108 aa, Homo sapiens
DIQMTQSPSSLSASVGDRVTITCRASQSITKELRWYQQKPGKAPMLLIYHASRLQRGVPSRFSGSGSGTDFTLTISSLQPEDFATYYCQQYHSWPLTFGQGTKVEIKR

SEQ ID NO: 103 - protein, 108 aa, Homo sapiens
DIQMTQSPSSLSASVGDRVAITCRASQGIGRELRWYQQKPGKAPMLLIHHASRLQSGVPSRFSGSGSGTDFTLTISSLQPEDFATYYCQQYNRWPLTFGQGTKVEIKR

SEQ ID NO: 104 - protein, 108 aa, Homo sapiens
DIQMTQSPSSLSASVGDRVTITCRASQNIGRELRWYQQKPGEAPMLLIYHASRLQSGVPSRFSGSGSGTDFTLTISSLQPEDFATYYCQQYFYWPLTFGQGTKVEIKR

SEQ ID NO: 105 - protein, 108 aa, Homo sapiens
DIQMTQSPSSLSASVGDRVTITCRASQNITRELRWYQQKPGKAPMLLIYHASRLQSGVPSRFSGSGSGTDFTLTISSLQPEDFATYYCQQYHGWPLTFGQGTKVEIKR

SEQ ID NO: 106 - protein, 108 aa, Homo sapiens
DIQMTQSPSSLSASVGDRVTITCRASQAIGRELRWYQQKPGKAPMLLIHHASRLQSGVPSRFSGSGSGTDFTLTISSLQPEDFATYYCQQYNGWPLTFGQGTKVEIKR

SEQ ID NO: 107 - protein, 108 aa, Homo sapiens
DIQMTQSPSSLSASVGDRVTITCRASQDIGRELRWYQQKPGKAPMFLIYHASRLQSGVPSRFSGSGSGTDFTLTISSLQPEDFATYYCQQYGFWPLTFGQGTKVEIKR

SEQ ID NO: 108 - protein, 108 aa, Homo sapiens
DIQMTQSPSSLSASVGDRVTITCRASQDITKELRWYQQKPGKAPMLLIHHASRLQSGVPSRFSGSGSGTDFTLTISSLQPEDFATYYCQQYHSWPLTFGQGTKVEIKR

SEQ ID NO: 109 - protein, 108 aa, Homo sapiens
DIQMTQSPSSLSASVGDRVTITCRASQSIGRELRWYQQKPGKAPMFLIYHASRLQSGVPSRFSGSGSGTDFTLTISSLQPEDFATYYCQQYYLWPLTFGQGTKVEIKR

SEQ ID NO: 110 - protein, 108 aa, Homo sapiens
DIQMTQSPSSLSASVGDRVTITCRASQRIGVELRWYQQKPGKAPMPLIYHASRLQSGVPSRFSGSGSGTDFTLTISSLQPEDFATYYCQQYFGWPLTFGQGTKVEIKR

SEQ ID NO: 111 - protein, 108 aa, Homo sapiens
DIQMTQSPSSLSASVGDRVTITCRASQWIDRELRWYQQKPGKAPMLLIYHASRLQSGVPSRFSGSGSGTDFTLTISSLQPEDFATYYCQQYHGWPLTFGQGTKVEIKR

SEQ ID NO: 112 - protein, 108 aa, Homo sapiens
DIQMTQSPSSLSASVGDRVTITCRASQSIFKELRWYQQKPEEAPMLLIHHASRLQSGVPSRFSGSGSGTDFTLTISSLQPEDFATYYCQQYHGWPLTFGQGTKVEIKR

SEQ ID NO: 113 - protein, 108 aa, Homo sapiens
DIQMTQSPSSLSASVGDRVTITCRASQEIGRELRWYQQKPGEAPMPLIYHASRLQSGVPSRFSGSGSGTDFTLTISSLQPEDFATYYCQQYFTWPLTFGQGTKVEIKR

SEQ ID NO: 114 - protein, 108 aa, Homo sapiens
DIQMTQSPSSLSASVGDRVTITCRASQPIGIELRWYQQKPGKAPMPLIYHASRLQSGVPSRFSGSGSGTDFTLTISSLQPEDFATYYCQQYHGWPLTFGQGTKVEIKQ

SEQ ID NO: 115 - protein, 108 aa, Homo sapiens
DIQMTQSPSSLSASVGDRVTITCRASQSIGRELRWYQQKPGKAPMLLIYHASRLRSGVPSRFSGSGSGTDFTLTISSLQPEDFATYYCQQYNGWPLTFGQGTKVEIKR

SEQ ID NO: 116 - protein, 108 aa, Homo sapiens
DIQMTQSPSSLSASVGDRVTITCRASQSIGRELRWYQQKPGKAPMFLIYHASRLQSGVPSRFSGSGSGTDFTLTISSLQPEDFATYYCQQYYDWPLTFGQGTKVEIKR

SEQ ID NO: 117 - protein, 108 aa, Homo sapiens
DIQMTQSPSSLSASVGDRVTITCRASQPIGRELRWYQQKPGKAPMFLIYHASRLQSGVPSRFSGSGSGTDFTLTISSLQPEDFATYYCQQYSGWPLTFGQGTKVEIKR

SEQ ID NO: 118 - protein, 108 aa, Homo sapiens
DIQMTQSPSSLSASVGDRVTITCRASQWIGRELRWYQQKPGKAPMLLIYHASRLQRGVPSRFSGSGSGTDFTLTISSLQPEDFATYYCQQYHGWPLTFGQGTKVEIKR

SEQ ID NO: 119 - protein, 108 aa, Homo sapiens
DIQMTQSPSSLSASVGDRVTITCRASQWIGRELRWYQQKPGKAPKLLIYHASRLQRGVPSRFSGSGSGTDFTLTISSLQPEDFATYYCQQYHGWPLTFGQGTKVEIKR

SEQ ID NO: 120 - protein, 108 aa, Homo sapiens
DIQMTQSPSSLSASVGDRVTITCRASQWIGRELRWYQQKPGEAPMFLIYHASRLQRGVPSRFSGSGSGTDFTLTISSLQPEDFATYYCQQYHGWPLTFGQGTKVEIKR

SEQ ID NO: 121 - protein, 108 aa, Homo sapiens
DIQMTQSPSSLSASVGDRVTITCRASQWIGRELRWYQQKPGKAPMFLIHHASRLQRGVPSRFSGSGSGTDFTLTISSLQPEDFATYYCQQYHGWPLTFGQGTKVEIKR

SEQ ID NO: 122 - protein, 108 aa, Homo sapiens
DIQMTQSPSSLSASVGDRVTITCRASQWIGRELRWYQQKPGEAPMFLIHHASRLQRGVPSRFSGSGSGTDFTLTISSLQPEDFATYYCQQYHGWPLTFGQGTKVEIKR

SEQ ID NO: 123 - protein, 108 aa, Homo sapiens
DIQMTQSPSSLSASVGDRVTITCRASQWIGRELRWYQQKPGKAPKFLIYHASRLIKGVPSRFSGSGSGTDFTLTISSLQPEDFATYYCQQYHGWPLTFGQGTKVEIKR

SEQ ID NO: 124 - protein, 108 aa, Homo sapiens
DIQMTQSPSSLSASVGDRVTITCRASQWIGRELRWYQQKPGKAPKFLIYHASRLQRGVPSRFSGSGSGTDFTLTISSLQPEDFATYYCQQYHGFPLTFGQGTKVEIKR

SEQ ID NO: 125 - protein, 108 aa, Homo sapiens
DIQMTQSPSSLSASVGDRVTITCRASQWIGRELRWYQQKPGKAPKFLIYHASRLYKGVPSRFSGSGSGTDFTLTISSLQPEDFATYYCQQYHGWPLTFGQGTKVEIKR

SEQ ID NO: 126 - protein, 108 aa, Homo sapiens
DIQMTQSPSSLSASVGDRVTITCRASQWIGRELRWYQQKPGKAPKFLIYHASRLQSGVPSRFSGSGSGTDFTLTISSLQPEDFATYYCQQYHGWPLTFGQGTKVEIKR

SEQ ID NO: 127 - protein, 108 aa, Homo sapiens
DIQMTQSPSSLSASVGDRVTITCRASQWIGRELRWYQQKPGKAPKLLIYHASRLQSGVPSRFSGSGSGTDFTLTISSLQPEDFATYYCQQYHGWPLTFGQGTKVEIKR

SEQ ID NO: 128 - protein, 108 aa, Homo sapiens
DIQMTQSPSSLSASVGDRVTITCRASAWIGRELRWYQQKPGKAPKFLIYHASRLIKGVPSRFSGSGSGTDFTLTISSLQPEDFATYYCQQYHGWPLTFGQGTKVEIKR

SEQ ID NO: 129 - protein, 108 aa, Homo sapiens
DIQMTQSPSSLSASVGDRVTITCRASGWIGRELRWYQQKPGKAPKFLIYHASRLYKGVPSRFSGSGSGTDFTLTISSLQPEDFATYYCQQYHGWPLTFGQGTKVEIKR

SEQ ID NO: 130 - protein, 108 aa, Homo sapiens
DIQMIQSPSSLSASVGDRVTITCRASQWIGRELRWYQQKPGKAPKLLIHHASRLQRGVPSRFSGSGSGTDFTLTISSLQPEDFTTYYCQQYHGWPLTFGQGTKVEIKR

SEQ ID NO: 131 - protein, 108 aa, Homo sapiens
DIQMTQSPSSLSASVGDRVTITCRASQWIGRELRWYQQKPGKAPKPLIYHASRLQRGVPSRFSGSGSGTDFTLTISSLQPEDFATYYCQQYHGWPLTFGQGTKVEIER

SEQ ID NO: 132 - protein, 108 aa, Homo sapiens
DIQMTQSPSSLSASVGDRVTITCRASQWIGRELRWYQQKPGKDPKPLIYHASRLQRGVPSRFSGSGSGTGFTLTISSLQPEDFATYYCQQYHGWPLTFGQGTKVEIKR

SEQ ID NO: 133 - protein, 108 aa, Homo sapiens
DIQMTQSPSSLSASVGDRVTITCRASQWIGRELRWYQQKPGKDPKVLIFHASRLQRGVPSRFSGSGSGTDFTLTISSLQPEDFATYYCQQYHGWPLTFGQGTKVEIKR

SEQ ID NO: 134 - protein, 108 aa, Homo sapiens
DIQMTQSPSSLSASVGDRVTITCRASQWIGRELRWYQQKPGKAPKQLIYHASRLQRGVPSRFSGSGSGTDFTLTISSLQPEDFTTYYCQQYHGWPLTFGQGTKVEIKR

SEQ ID NO: 135 - protein, 108 aa, Homo sapiens
GIQMTQSPSSLSASVGDRVTITCRASQWIGRELRWYQQKPGKASKPLIYHASRLQRGVPSRFSGSGSGTDFTLTISSLQPEDFATYYCQQYHGWPLTFGQGTKVEIKR

SEQ ID NO: 136 - protein, 108 aa, Homo sapiens
DIQMTQSPSSLSASVGDRVTITCRASQWIGRELRWYQQKPGKDPKLLIHHASRLQRGVPSRFSGSGSGTDFTLTISSLQPEDFATYYCQQYHGWPLTFGQGTKVEIKR

SEQ ID NO: 137 - protein, 108 aa, Homo sapiens
DIQMTQFPSSLSASVGDRVSITCRASQWIGRELRWYQQKPGKDPKPLIYHASRLQRGVPSRFSGSGSGTDFTLTISSLQPEDLATYYCQQYHGWPLTFGQGTKVEIKR

SEQ ID NO: 138 - protein, 108 aa, Homo sapiens
DIQMTQSPSSLSASVGDRVTITCRASQWIGRELRWYQQKPGKAPKPLIYHASRLQRGVPSRFSGSGSGTDFTLTISSLQPEDFATYYCQQYHGWPLTFGQGTKVEIKR

SEQ ID NO: 139 - protein, 108 aa, Homo sapiens
DIQMTQSPSSLSASVGDRVIITCRASQWIGRELRWYQQKPGKAPKLLIFHASRLQRGVPSRFSGSGSGTDFTLTISSLQPEDFATYYCQQYHGWPLTFGQGTKVEIKR

SEQ ID NO: 140 - protein, 108 aa, Homo sapiens
DIQMTQSPSSLSASVGDRVTITCRASQWIGRELRWYQQKPGKSPKPLIYHASRLQRGVPSRFSGSGSGTDFTLIISSLQPEDFATYYCQQYHGWPLTLGQGTKVEIKR

SEQ ID NO: 141 - protein, 108 aa, Homo sapiens
DIQMTQSPPSLSASVGDRVTITCRASQWIGRELRWCQQKPGKAPKLLIFHASRLQRGVPSRFSGSGSGTDFTLTISSLQPEDFATYYCQQYHGWPLTFGQGTKVEIKR

SEQ ID NO: 142 - protein, 108 aa, Homo sapiens
DIQMTQSPSSLSASVGDRVTITCRASQWIGRELRWYQQKPGKAPKLLIHHASRLQRGVPSRFSGSGSGTDFTLTISSLQPEDFATYYCQQYHGWPLTFGQGTKVEIKR

SEQ ID NO: 143 - protein, 108 aa, Homo sapiens
DIQMTQSPSSLSASVGDRVTITCRASQWIGRELRWYQQKPGKAPKLLIHHASRLQRGVPSRFSGSGSGADFTLTISSLQPEDFATYYCQQYHGWPLTFGQWTKVEIKR

SEQ ID NO: 144 - protein, 108 aa, Homo sapiens
DIQMTQSPSSLSASVGDRVTITCRASQWIGRELRWYQQKPGKAPKLLFHHASRLQRGVPSRFSGSGSGTDFTLTISSLQPEDFATYYCQQYHGWPLTFGQGTKVEIKR

SEQ ID NO: 145 - protein, 108 aa, Homo sapiens
DIQMTQSPSSLSASVGDRVTITCRASQWIGRELRWYQQKPGKAPKLLIFHASRLQRGVPSRFSGSGSGTDFTLTISSLQPEDFATYYCQQYHGWPLTFGQGTKVEIKR

SEQ ID NO: 146 - protein, 108 aa, Homo sapiens
DIQMTQSPSSLSASVGDRVTITCRASQWIGRELRWYQQKPGKAPMPLIYHASRLQRGVPSRFSGSGSGTDFTLTISSLQPEDFATYYCQQYHGWPLTFGQGTKVEIKR

SEQ ID NO: 147 - protein, 108 aa, Homo sapiens
DIQMTQSPSSLSASVGDRVTITCRASQWIGRELRWYQQKPGKAPKLLIFHASRLQRGVPSRFSGSGSGTDFTLTISSLQPEDFAAYYCQQYHGWPLTFGQGTKVEIKR

SEQ ID NO: 148 - protein, 108 aa, Homo sapiens
DIQMTQSPSSLSASVGDRVTITCRTSQWIGRELRWYQQKPGKAPKLLIHHASRLQRGVPSRFSGSGSGTDFTLTISSLQPEDFATYYCQQYHGWPLTFGQGTKVEIKR

SEQ ID NO: 149 - protein, 108 aa, Homo sapiens
DIQMTQSPSSLSASVGDHVTITCRASQWIGRELRWDQQKPGKAPKLLIYHASRLQRGVPSRFSGSGSGTDFTLTISSLQPEDFATYYCQQYHGWPLTFGQGTKVEIKR

SEQ ID NO: 150 - protein, 108 aa, Homo sapiens
DIQMTQSPSSLSASVGDRVTITCRASQWIGRELRWYQQKPGKAPTPLIYHASRLQRGVPSRFSGSGSGTDFTLTISSLQPEDFATYYCQQYHGWPLTFGQGTKVEIKR

SEQ ID NO: 151 - protein, 108 aa, Homo sapiens
DIQMTQSPSSLSASVGDRVTITCRASQWIGRELRWYQQKPGKAPKQLIYHASRLQRGVPSRFSGSGSGSDFTLTISSLQPEDFATYYCQQYHGWPLTFGQGTKAEIKR

SEQ ID NO: 152 - protein, 108 aa, Homo sapiens
DIQMTQSPSSLSASVGDRVAITCRASQWIGRELRWYQQKPGKAPKLLIFHASRLQRGVPSRFSGSGSGTDFTLTISSLQPEDFATYYCQQYHGWPLTFGQGTKVEIKR

SEQ ID NO: 153 - protein, 108 aa, Homo sapiens
GIQMTQSPSSLSASVGDRVTITCRASQWIGRELRWYQQKPGKDPKPLIYHASRLQRGVPSRFSGSGSGTDFTLTISSLQPEDFATYYCQQYHGWPLTFGQGTKVEIKR

SEQ ID NO: 154 - protein, 108 aa, Homo sapiens
DIQMTQSPSSLSASVGDRVTITCRASQWIGRELRWYQQKPGKAPKVLIFHASRLQRGVPSRFSGSGSGTDFTLTISSLQPEDFATYYCQQYHGWPLTFGQGTKVEIKR

SEQ ID NO: 155 - protein, 108 aa, Homo sapiens
DIQMTQSPSSLSASVGDRVTITCRASQWIGRELRWYQQKPGKDPKPLIYHASRLQRGVPSRFSGSGSGTDFTLTISSLQPEDFATYYCQQYHGWPLTSGQGTKVEIKR

SEQ ID NO: 156 - protein, 108 aa, Homo sapiens
DIQMTQSPSSLSASVGDRVTITCRASQWIGRELRWYQQEPGEAPKPLIYHASRLQRGVPSRFSGSGSGTDFTLTISSLQPDDSATYYCQQYHGWPLTFGQGTRVEIKR

SEQ ID NO: 157 - protein, 108 aa, Homo sapiens
DIQMTQSPSSLSASVGDRVTITCRASQWIGRELRWYQQEPGKAPKLLIHHASRLQRGVPSRFSGSGSGTDFTLTISSLQPEDFATYYCQQYHGWPLTFGQGTKVEIKR

SEQ ID NO: 158 - protein, 108 aa, Homo sapiens
DIQMTQSPSSLSASVGDRVTITCRASQWIGRELRWYQQKPGKAPKLLIFHASRLQRGVPSRFSGSGSGTDFTLTISSLQPEDYATYYCQQYHGWPLTFGQGTKVEIKR

SEQ ID NO: 159 - protein, 108 aa, Homo sapiens
DIQMTQSPSSLSASVGDRVTITCRASQWIGRELRWYQQKPGKAPNPLIYHASRLQRGVPSRFSGSGSGTDFTLTISSLQPEDFATYYCQQYHGWPLTFGQGTKVEIKR

SEQ ID NO: 160 - protein, 108 aa, Homo sapiens
DIQMTQSPSSLSASVGDRVTITCRASQWIGRELRWYQQKPGKAPKQLIYHASRLQRGVPSRFSGSGSGTDFTLTISSLQPEDFATYYCQQYHGWPLTSGQGTKVEIKR

SEQ ID NO: 161 - protein, 108 aa, Homo sapiens
DIQMTQSPSSLSASVGDRVTITCRASQWIDRELRWYQQKPGKAPKQLIYHASRLQRGVPSRFSGSGSGTDFTLTISSLQPEDFATYYCQQYHGWPLTFGQGTKVEIKR

SEQ ID NO: 162 - protein, 108 aa, Homo sapiens
DIQMTQSPSSLSASVGDRVTITCRASQWIGRELRWYQQKPGKAPKPLIYHASRLQRGVPSRFSGSRSGTDFTLTISSLQPEDFATYYCQQYHGWPLTFGQGTKVEIKR

SEQ ID NO: 163 - protein, 108 aa, Homo sapiens
DIQMTQSPSSLSASVGDRVTITCRASQWVGRELRWYQQIPGKAPKQLIYHASRLQRGVPSRFSGSGSGTDFTLTIGSLQPEDFATYYCQQYHGWPLTFGQGTKVEIKR

SEQ ID NO: 164 - protein, 108 aa, Homo sapiens
DIQMTQSPSSLSASVGDHVTITCRASQWIGRELRWDQQKPGKAPKFLIYHASRLQRGVPSRFSGSGSGTDFTLTISSLQPEDFATYYCQQYHGWPLTFGQGTKVEIKR

SEQ ID NO: 165 - protein, 108 aa, Homo sapiens
DIQMTQSPSSLSASVGDRVTITCRASQWIGRELRWYQQKPGKAPKGLIYHASRLQRGVPSRFSGSGSGTDFTLTISSLQPEDFATYYCQQYHGWPLTFGQGTKVEIKR

SEQ ID NO: 166 - protein, 108 aa, Homo sapiens
DIHMTQSPSSLSASVGDRVTITCRASQHIGRSLQWYQQKPGKAPKLLIYYTSILQSGVPSRFSGSGSGTDFTLTISSLQPEDFATYYCQQQGEFPFTFGQGTKVEIKR

SEQ ID NO: 167 - protein, 108 aa, Homo sapiens
DIQMTQSPSSLSASVGDRVTITCRASQHIKNFLYWYQQKPGKAPKLLIYHASTLQSGVPSRFSGSGSGTDFTLTISSLQPEDFATYYCQQYMDEPRTFGQGTKVEIKR

SEQ ID NO: 168 - protein, 108 aa, Homo sapiens
DIQMTQSPSSLSASVGDRVTITCRASQVISVALNWYQQKPGKAPKLLIYQGSILQSGVPSRFSGSGSGTDFTLTISSLQPEDFATYYCQQSWQWPFTFGQGTKVEIKR

SEQ ID NO: 169 - protein, 108 aa, Homo sapiens
DIQMTQSPSSLSASVGDRVTITCRASQAIGNMLYWYQQKPGKAPKLLIYNASYLQSGVPSRFSGSGSGTDFTLTISSLQPEDYATYYCQQREMIPHTFGQGTKVGIKR

SEQ ID NO: 170 - protein, 108 aa, Homo sapiens
DIQMTQSPSSLSASVGDRVTITCRASQDIGEELLWYQQKPGKAPKLLIYSASSLRSGVPSRFSGSGSGTDFTLTISSLQPEDFATYYCQQYVTSPNTFGQGTKVEIKR

SEQ ID NO: 171 - protein, 108 aa, Homo sapiens
DIQMTQSPSSLSASVGDRVTITCRASQGIQTFLYWYQQKPGKAPKLLIYSSSILQRGVPSRFSGSGSGTDFTLTISSLQPEDFATYYCQQYGNYPFTFGQGTKVEIKR

SEQ ID NO: 172 - protein, 108 aa, Homo sapiens
DIQMTQSPSSLSASVGDRVTITCRASQNIDRELRWYQQKPGKAPMLLIYHASRLQSGVPSRFSGSGSGTDFTLTISSLQPEDFATYYCQQYHDFPLTFGQGTKVEIKR

SEQ ID NO: 173 - protein, 108 aa, Homo sapiens
DIQMTQSPSSLSASVGDRVTITCRASQNIDRELRWYQQKPGKAPMFLIYHASRLQRGVPSRFSGSGSGTDFTLTISSLQPEDFATYYCQQYHDFPLTFGQGTKVEIKR

SEQ ID NO: 174 - protein, 108 aa, Homo sapiens
DIQMTQSPSSLSASVGDRVTITCRASQNIDRELRWYQQKPGKAPMFLIYHASRLQHGVPSRFSGSGSGTDFTLTISSLQPEDFATYYCQQYHDFPLTFGQGTKVEIKR

SEQ ID NO: 175 - protein, 108 aa, Homo sapiens
DIQMTQSPSSLSASVGDRVTITCRASQNIDRELRWYQQKPGKAPVFLIYHASRLQSGVPSRFSGSGSGTDFTLTISSLQPEDFATYYCQQYHDFPLTFGQGTKVEIKR

SEQ ID NO: 176 - protein, 108 aa, Homo sapiens
DIQLTQSPSSLSASVGDRVTITCRASQNIDRELRWYQQKPGKAPMFLIYHASRLQSGVPSRFSGSGSGTDFTLTIRSLQPEDFATYYCQQYHDFPLTSGQGTKVEIKR

SEQ ID NO: 177 - protein, 108 aa, Homo sapiens
DIQMTQSPSSLSASVGDRVTITCRASQNIDRELRWYQQKPGKAPMFLIYHASRLQSGVPSRFSGSGSGTDFTLTISSLQPEDYATYYCQQYHDFPLTFGQGTKVEIKR

SEQ ID NO: 178 - protein, 108 aa, Homo sapiens
DIQMTQSPSSLSASVGDRVTITCRASQNIDRELRWYQQKPGKAPMFLIYHASRLQSGVPSRFSGSGSGTDFTLTISSLQPEDFATYYCQQYHDFPLTFGQGTKVEIKR

SEQ ID NO: 179 - protein, 108 aa, Homo sapiens
DIQMTQSPSSLSASVGDRVTITCRASQNIDRELRWYQQKPGKAPMPLIYHASRLQRGVPSRFSGRGSGTDFSLTISSLQPEDFATYYCQQYHDFPLTFGQGTKVEIKR

SEQ ID NO: 180 - protein, 108 aa, Homo sapiens
DIQMTQSPSSLSASVGDRVTITCRASQNIGRELRWYQQKPGKAPMFLIYHASRLQRGVPSRFSGSGSGTDFTLTISSLQPEDFATYYCQQYHDFPLTFGQGTKVEIKR

SEQ ID NO: 181 - protein, 108 aa, Homo sapiens
DIQMTQSPSSLSASVGDRVTITCRASQNIDRELRWYQQKPGKAPRFLIYHASRLQSGVPSRFSGSGSGTDFTLTISSLQPEDFATYYCQQYHDFPLTIGQGTKVEIKR

SEQ ID NO: 182 - protein, 108 aa, Homo sapiens
DIQMTQSPSSLSASVGDRVTITCRASQNIGRELRWYQQKPGKAPMFLIYHASRLQSGVPSRFSGSGSGTDFTLTISSLQPEDFATYYCQQYHDFPLTFGQGTKVEIKR

SEQ ID NO: 183 - protein, 108 aa, Homo sapiens
DIQMTQSPSSLSASVGDRVTITCRASQNIDRELRWYQQKPGKDPMFLIYHASRLQRGVPSRFSGSGSGTYFTLTISSLQPEDFATYYCQQYHDFPLTFGQGTKVEIKR

SEQ ID NO: 184 - protein, 108 aa, Homo sapiens
DIQMTQSPSSLSASVGDRVTITCRASQNIDRELRWYQQKPGKAPMFLIYHASRLLSGVPSRFSGSGFGTDFTLTISSLQPEDFATYYCQQYHDFPLTFGQGTKVEIKR

SEQ ID NO: 185 - protein, 108 aa, Homo sapiens
DIQMTQSPSSLSASVGDRVTITCRASQSIGRELRWYQQKPGKAPMFLIYHASRLQRGVPSRFSGSGSGTDFTLTISSLQPEDFATYYCQQYHDFPLTFGQGTKVEIKR

SEQ ID NO: 186 - protein, 108 aa, Homo sapiens
DIQMTQSPSSLSASVGDRVTITCRASQNIDRELRWYQQKPGKAPMPLIYHASRLQSGVPSRFSGSGSGTDFTLTISSLQPEDFATYYCQQYHDFPLTFGQGTKVEIKR

SEQ ID NO: 187 - protein, 108 aa, Homo sapiens
DIQMTQSPSSLSASVGDRVTITCRASQNIDRELRWYQQKPGEAPMFLIYHASRLQSGVPSRFSGSGSGTDFTLTISSLQPEDFATYYCQQYHDFPLTFGQGTKVEIKR

SEQ ID NO: 188 - protein, 108 aa, Homo sapiens
DIQMTQSPSSLSASVGDRVTITCRASQNIDRELRWYQQKPGKAPMFLIYHASRLQRGVPSRFSGSGSGTDFTLTISSLQPEDFATYYCQQYHDFPLTFGQGTKVENKR

SEQ ID NO: 189 - protein, 108 aa, Homo sapiens
EIKMTQSPSSLSASVGDRVTITCRASKNIDRELRWYQQKPGKAPMFLIYHASRLLKGVPSRFSGSGSGTDFTLTISSLQPEDFATYYCQQYHDFPLTFGQGTKVEIKR

SEQ ID NO: 190 - protein, 108 aa, Homo sapiens
PIVMTQSPSSLSASVGDRVTITCRASSSIDRELRWYQQKPGKAPMFLIYHASRLMKGVPSRFSGSGSGTDFTLTISSLQPEDFATYYCQQYHDFPLTFGQGTKVEIKR

SEQ ID NO: 191 - protein, 108 aa, Homo sapiens
DIQMTQSPSSLSASVGDRVTITCRASNNIDRELRWYQQKPGKAPMFLIYHASRLMKGVPSRFSGSGSGTDFTLTISSLQPEDFATYYCQQYHDFPLTFGQGTKVEIKR

SEQ ID NO: 192 - protein, 108 aa, Homo sapiens
DIQMTQSPSSLSASVGDRVTITCRASQNIDRELRWYQQKPGKAPMFLIYHASRLLRGVPSRFSGSGSGTDFTLTISSLQPEDFATYYCQQYHDFPLTFGQGTKVEIKR

SEQ ID NO: 193 - protein, 108 aa, Homo sapiens
DIQMTQSPSSLSASVGDRVTITCRASQNIDRELRWYQQKPGKAPMFLIYHASRLRRGVPSRFSGSGSGTDFTLTISSLQPEDFATYYCQQYHDFPLTFGQGTKVEIKR

SEQ ID NO: 194 - protein, 108 aa, Homo sapiens
DIQMTQSPSSLSASVGDRVTITCRASQNIDRELRWYQQKPGKAPMFLIYHASRLQRGVPSRFSGSGSGTDFTLTISSLQPEDFATYYCQQYHDFPLTIGQGTKVEIKR

SEQ ID NO: 195 - protein, 108 aa, Homo sapiens
DIQMTQSPSSLSASVGDRVTITCRASQNIDRELRWYQQKPGKDPMFLIYHASRLQRGVPSRFSGSGSGTDFTLTISSLQPEDFATYYCQQYHDFPLTFGQGTKVEIKR

SEQ ID NO: 196 - protein, 108 aa, Homo sapiens
NIDMTQSPSSLSASVGDRVTITCRASQNIDRELRWYQQKPGKAPMFLIYHASRLYRGVPSRFSGSGSGTDFTLTISSLQPEDFATYYCQQYHDFPLTFGQGTKVEIKR

SEQ ID NO: 197 - protein, 108 aa, Homo sapiens
HISMTQSPSSLSASVGDRVTITCRASSNIDRELRWYQQKPGKAPMFLIYHASRLIKGVPSRFSGSGSGTDFTLTISSLQPEDFATYYCQQYHDFPLTFGQGTKVEIKR

SEQ ID NO: 198 - protein, 108 aa, Homo sapiens
EIRMTQSPSSLSASVGDRVTITCRASNNIDRELRWYQQKPGKAPMFLIYHASRLYKGVPSRFSGGGSGTDFTLTISSLQPEDFATYYCQQYHDFPLTFGQGTKVEIKR

SEQ ID NO: 199 - protein, 108 aa, Homo sapiens
RIVMTQSPSSLSASVGDRVTITCRASNNIDRELRWYQQKPGKAPMFLIYHASRLIKGVPSRFSGSGSGTDFTLTISSLQPEDFATYYCQQYHDFPLTFGQGTKVEIKR

SEQ ID NO: 200 - protein, 108 aa, Homo sapiens
PIRMTQSPSSLSASVGDRVTITCRASANIDRELRWYQQKPGKAPMFLIYHASRLIKGVPSRFSGSGSGTDFTLTISSLQPEDFATYYCQQYHDFPLTFGQGTKVEIKR

SEQ ID NO: 201 - protein, 108 aa, Homo sapiens
TISMTQSPSSLSASVGDRVTITCRASSNIDRELRWYQQKPGKAPMFLIYHASRLYRGAPSRFSGSGSGTDFTLTISSLQPEDFATYYCQQYHDFPLTFGQGTKVEIKR

SEQ ID NO: 202 - protein, 108 aa, Homo sapiens
RILMTQSPSSLSASVGDRVTITCRASLNIDRELRWFQQKPGKAPMFLIYHASRLHKGVPSRFSGSGSGTDFTLTISSLQPEDFATYYCQQYHDFPLTFGQGTKVEIKR

SEQ ID NO: 203 - protein, 108 aa, Homo sapiens
GIVMTQSPSSLSASVGDRVTITCRASINIDRELRWYQQKPGKAPMFLIYHASRLHKGAPSRFSGSGSGTDFTLTISSLQPEDFATYYCQQYHDFPLTFGQGTKVEIKR

SEQ ID NO: 204 - protein, 108 aa, Homo sapiens
SIVMTQSPSSLSASVGDRVTITCRASQNIDRELRWYQQKPGKAPMFLIYHASRLHKGVPSRFSGSGSGTDFTLTISSLQPEDFATYYCQQYHDFPLTFGQGTKVEIKR

SEQ ID NO: 205 - protein, 108 aa, Homo sapiens
DILMTQSPSSLSASVGDRVTITCRASTNIDRELRWYQQKPGKAPMFLIYHASRLYKGVPSRFSGSGSGTDFTLTISSLQPEDFATYYCQQYHDFPLTLGQGTKVEIKR

SEQ ID NO: 206 - protein, 108 aa, Homo sapiens
QINMTQSPSSLSASVGDRVTITCRASSNIDRELRWYQQKPGKAPMFLIYHASRLIKGVPSRFSGSGSGTDFTLTISSLQPEDFATYYCQQYHDFPLTFGQGTKVEIKR

SEQ ID NO: 207 - protein, 108 aa, Homo sapiens
TIQMTQSPSSLSASVGDRVTITCRASENIDRELRWYQQKPGKAPMFLIYHASRLIKGVPSRFSGSGSGTDFTLTISSLQPEDFATYYCQQYHDFPLTFGQGTKVEIKR

SEQ ID NO: 208 - protein, 108 aa, Homo sapiens
QILMTQSPSSLSASVGDRVTITCRASSNIDRELRWYQQKPGKAPMFLIYHASRLMKGVPSRFSGSGSGTDFTLTISSLQPEDFATYYCQQYHDFPLTFGQGTKVEIKR

SEQ ID NO: 209 - protein, 108 aa, Homo sapiens
QIVMTQSPSSLSASVGDRVTITCRASGNIDRELRWYQQKPGKAPMFLIYHASRLYKGVPSRFSGSGSGTDFTLTISSLQPEDFATYYCQQYHDFPLTFGQGTKVEIKR

SEQ ID NO: 210 - protein, 108 aa, Homo sapiens
DILMTQSPSSLSASVGDRVTITCRASSNIDRELRWYQQKPGKAPMFLIYHASRLMKGVPSRFSGSGSGTDFTLTISSLQPEDFATYYCQQYHDFPLTFGQGTKVEIKR

SEQ ID NO: 211 - protein, 108 aa, Homo sapiens
GIEMTQSPSSLSASVGDRVTITCRASNNIDRELRWYQQKPGKAPMFLIYHASRLHRGVPSRFSGSGSGTDFTLTISSLQPEDFATYYCQQYHDFPLTFGQGTKVEIKR

SEQ ID NO: 212 - protein, 108 aa, Homo sapiens
GIVMTQSPSSLSASVGDRVTITCRASNNIDRELRWYQQKPGKAPMFLIYHASRLYKGVPSRFSGSGSGTDFTLTISSLQPEDFATYYCQQYHDFPLTFGQGTKVEIKR

SEQ ID NO: 213 - protein, 108 aa, Homo sapiens
PIKMTQSPSSLSASVGDRVTITCRASRNIDRELRWYQQKPGKAPMFLIYHASRLMHGVPSRFSGSGSGTDFTLTISSLQPEDFATYYCQQYHDFPLTFGQGTKVEIKR

SEQ ID NO: 214 - protein, 108 aa, Homo sapiens
NIVMTQSPSSLSASVGDRVTITCRASQNIDRELRWYQQKPGKAPMFLIYHASRLYKGVPSRFSGSGSGTDFTLTISSLQPEDFATYYCQQYHDFPLTFGQGTKVEIKR

SEQ ID NO: 215 - protein, 108 aa, Homo sapiens
DIQMTQSPSSLSASVGDRVTITCRASQDIYLNLNWYQQKPGKAPKLLIYGTSNLQSGVPSRFSGSGSGTDFTLTISSLQPEDFATYYCQPSFLYPYTFGQGTKVEIRR

SEQ ID NO: 216 - protein, 108 aa, Homo sapiens
DIQMTQSPSSLSASVGDRVTITCRASQDIYLNLNWYQQKPGKAPKLLIYGTSNLQSGVPSRFSGSGSGTDFTLTISSLQPEDFATYYCQPSFYFPYTFGQGTKVEIRR

SEQ ID NO: 217 - protein, 108 aa, Homo sapiens
DIQMTQSPSSLSASVGDRVTITCRASQDIYLNLDWYQQKPGKAPKLLIYGTSNLQSGVPSRFSGSGSGTDFTLTISSLQPEDFATYYCQPSFFFPYTFGQGTKVEIRR

SEQ ID NO: 218 - protein, 108 aa, Homo sapiens
DIQMTQSPSSLSASVGDRVTITCRASQDIYLNLDWYQQKPGKAPKLLIYGTSNLQSGVPSRFSGSGSGTDFTLTISSLQPEDFATYYCQPSFYFPYTFGQGTKVEIRR

SEQ ID NO: 219 - protein, 108 aa, Homo sapiens
DIQMTQSPSSLSASVGDRVTITCRASQDIYLNLDWYQQKPGKAPKLLIYGTSNLQSGVPSRFSGSGSGTDFTLTISSLQPEDFATYYCQPSFFHPYTFGQGTKVEIRR

SEQ ID NO: 220 - protein, 108 aa, Homo sapiens
DIQMTQSPSSLSASVGDRVTITCRASQDIFLNLEWYQQKPGKAPKLLIYGTSNLQSGVPSRFSGSGSGTDFTLTISSLQPEDFATYYCQPSFYFPYTFGQGTKVEIRR

SEQ ID NO: 221 - protein, 108 aa, Homo sapiens
DIQMTQSPSSLSASVGDRVTITCRASQDIYLNLDWYQQKPGKAPKLLIYGTSNLQSGVPSRFSGSGSGTDFTLTISSLQPEDFATYYCQPSFLFPYTFGQGTKVEIRR

SEQ ID NO: 222 - protein, 108 aa, Homo sapiens
DIQMTQSPSSLSASVGDRVTITCRASQDIYLNLDWYQQKPGEAPKLLIYGTSNLQSGVPSRFSGSGSGTDFTLTISSLQPEDFATYYCQPSFLYPYTFGQGTKVEIRR

SEQ ID NO: 223 - protein, 108 aa, Homo sapiens
DIQMTQSPSSLSASVGDRVTITCRASQDIYLNLDWYQQKPGKAPKLLIYGTSNLQSGVPSRFSGSGSGTDFTLTIGSLQPEDFATYYCQPSFLYPYTFGQGTKVEIRR

SEQ ID NO: 224 - protein, 108 aa, Homo sapiens
DIQMTQSPSSLSASVGDRVTITCRASQDIYLNLDWYQQKPGKAPRLLIYGTSNLQSGVPSRFSGSGSGTDFTLTISSLQPEDFATYYCQPSFLYPYTFGQGTKVEIRR

SEQ ID NO: 225 - protein, 108 aa, Homo sapiens
DIQMTQSPPSLSASVGDRVTITCRASQDIYLNLNWYQQKPGKAPKLLIYGTSNLQSGVPSRFSGSGSGTDFTLTISSLQPEDFATYYCQPSFYLPYTFGQGTKVEIRR

SEQ ID NO: 226 - protein, 108 aa, Homo sapiens
DIQVTQSPSSLSASVGDRVTITCRASQDIYLNLNWYQQKPGKAPKLLIYGTSNLQSGVPSRFSGSGSGTDFTLTISSLQPEDFATYYCQPSFYFPYTFGQGTKVEIRR

SEQ ID NO: 227 - protein, 108 aa, Homo sapiens
DIQMTQSPSSLSASVGDRVTITCRASQDIYLNLNWYQQKPGKAPKLLIYGTSDLQSGVPSRFSGSGSGTDFTLTISSLQPEDFATYYCQPSFWMPYTFGQGTKVEIRR

SEQ ID NO: 228 - protein, 108 aa, Homo sapiens
DIQMTQSPSSLSASVGDRVTITCRASQDIYLNLNWYQQKPGKAPKLLIYGTSNLQSGVPSRFGGSGSGTDFTLTISSLQPEDFATYYCQPSFYHPYTFGQGTKVEIRR

SEQ ID NO: 229 - protein, 108 aa, Homo sapiens
DIQMTQSPSSLSASVGDRVTITCRASQDIYLNLDWYQQKPGKAPKLLIYGTSNLQSGVPSRFSGSGSGTDFTLTISSLQPEDFATYYCQPSFYYPYTFGQGTKVEIRR

SEQ ID NO: 230 - protein, 108 aa, Homo sapiens
DIQMTQSPSSLSASVGDRVTITCRASQDIWLNLDWYQQKPGEAPKLLIYGTSNLQSGVPSRFSGSGSGTDFTLTISSLQPEDFATYYCQPSFYFPYTFGQGTKVEIRR

SEQ ID NO: 231 - protein, 108 aa, Homo sapiens
DIQMTQSPSSLSASVGDRVTITCRASQDIYLNLDWYQQKPGEAPKLLIYGTSNLQSGVPSRFSGSGSGTDFTLTISSLQPEDLATYYCQPSFYFPYTFGQGTKVEIRR

SEQ ID NO: 232 - protein, 108 aa, Homo sapiens
DIQMTQSPSSLSASVGDRVTITCRASQDIYLNLNWYQQKPGKAPKLLIYGTSNLQSGVPSRFSGSGYGTDFTLTISSLQPEDFATYYCQPSFLYPYTFGQGTKVEIRR

SEQ ID NO: 233 - protein, 108 aa, Homo sapiens
DIQMTQSPSSLSASVGDRVTITCLASQDIYLNLNWYQQKPGKAPKLLIYGTSNLQSGVPSRFSGSGYGTDFTLTISSLQPEDFATYYCQPSFLYPYTFGQGTKVEIRR

SEQ ID NO: 234 - protein, 108 aa, Homo sapiens
DIQMTQSPSSLSASVGDRVTITCRASQDIYLNLNWYQQKPGKAPKLLIYGTSDLQSGVPSRFSGSGSGTDFTLTISSLQPEDFATYYCQPSFLYPYTFGQGTKVEIRR

SEQ ID NO: 235 - protein, 108 aa, Homo sapiens
DIQMTQSPSSLSASVGDRVTITCRASQDIWLNLDWYQQKPGKAPKLLIYGTSDLQSGVPSRFSGSGSGTDFTLTISSLQPEDFATYYCQPSFMFPYTFGQGTKVEIRR

SEQ ID NO: 236 - protein, 108 aa, Homo sapiens
DIQMTQSPSSLSASVGDRVTITCRASQDIYLNLNWYQQKPGKAPKLLIYGTSNLQSGVPSRFSGSGYGTDFTLTISSLQPEDFATYYCQPSFLYPYTFGQGTKVENRR

SEQ ID NO: 237 - protein, 108 aa, Homo sapiens
DIQMTQSPSSLSASVGDRVIITCRASQDIYLNLNWYQQKPGKAPKLLIYGTSNLQSGVPSRFSGSGSGTDFTLTISSLQPEDFATYYCQPSFVFPYTFGQGTKVEIRR

SEQ ID NO: 238 - protein, 108 aa, Homo sapiens
DIQMTQSPSSLSASVGDRVTITCRASQDIYLNLDWYQQKPGEAPKLLIYGTSNLQSGVPSRFSGSGSGTDFTLTISSLQPEDFATYYCQPSFLFPYTFGQGTKVEIRR

SEQ ID NO: 239 - protein, 108 aa, Homo sapiens
DIQMTQSPSSLSASVGDRVTITCRASQDIYLNLNWYQQKPGKAPKLLIYGTSNLQSGVPSRFSGSGYGTNFTLTISSLQPEDFATYYCQPSFLYPYTFGQGTKVEIRR

SEQ ID NO: 240 - protein, 108 aa, Homo sapiens
DIQMTQSPSSLSASVGDRVTITCRASQDIYLNLNWYQQKPEKAPKLLIYGTSNLQSGVPSRFSGSGSGTDFTLTISSLQPEDFATYYCQPSFLYPYTFGQGTKVEIRR

SEQ ID NO: 241 - protein, 108 aa, Homo sapiens
DIQMTQSPSSLSASVGDRVTITCRASQDIYLNLNWYQQKPGTAPKLLIYGTSNLQSGVPSRFSGSGSGTDFTLTISSLQPEDFATYYCQPSFLYPYTFGQGTKVEIRR

SEQ ID NO: 242 - protein, 108 aa, Homo sapiens
DIQMTQSPSSLFASVGDRVTITCRASQDIYLNLNWYQQKPGKAPKLLIHGTSNLQSGVPSRFSGSGSGTDFTLTISSLQPEDFATYYCQPSFLYPYTFGQGTKVEIRR

SEQ ID NO: 243 - protein, 108 aa, Homo sapiens
DIQMTQSPSSLSASVGDRVTITCRASQDIYLNLNWYQQKPGKAPKLLIYGTSNLQSGVPSRFSGSGSGADFTLTISSLQPEDFATYYCQPSFLYPYTFGQGTKVEIRR

SEQ ID NO: 244 - protein, 108 aa, Homo sapiens
DIQMTQSPSSLSASVGDRVTITCRASQDIYLNLDWYQQKPGKAPKLLIYGSSYLQSGVPSRFSGSGSGTDFTLTISSLQPEDFATYYCQPSFYFPYTFGQGTKVEIRR

SEQ ID NO: 245 - protein, 108 aa, Homo sapiens
DIQMTQSPSSLSASVGDRVTITCRASQDIYLNLDWYQQKPGKAPKLLIRGVSELQSGVPSRFSGSGSGTEFTLTISSLQPEDFATYYCQPSFYFPYTFGQGTKVEIRR

SEQ ID NO: 246 - protein, 108 aa, Homo sapiens
DIQMTQSPSSLSASVGDRVTITCRASQDIYLNLDWYQQKPGKAPKLLISLASELQSGVPSRFSGSGSGTDFTLTISSLQPEDFATYYCQPSFYFPYTFGQGTKVEIRR

SEQ ID NO: 247 - protein, 108 aa, Homo sapiens
DIQMTQSPSSLSASVGDRVTITCRASQDIYLNLDWYQQKPGKAPKLLIGLTSDLQSGVPSRFSGSGSGTDFTLTISSLQPEDFATYYCQPSFYFPYTFGQGTKVEIRR

SEQ ID NO: 248 - protein, 108 aa, Homo sapiens
DIQMTQSPSSLSASVGDRVTITCRASQDIYLNLDWYQQKPGKAPKLLIYGTSNLQSGVPSRFSGSGYGTDFTLTISSLQPEDFATYYCQPSFYFPYTFGQGTKLEIRR

SEQ ID NO: 249 - protein, 108 aa, Homo sapiens
DIQMTQAPSSLSASVGDRVTITCRASQDIYLNLDWYQQTPGNAPKLLIYGTSNLQSGVPSRFSGSGSGTDFTLTISSLQPEDFATYYCQPSFYFPYTFGQGTKVEIRR

SEQ ID NO: 250 - protein, 108 aa, Homo sapiens
DIQMTQSPSSLSASVGDRVTITCRASQVIYLNLDWYQQKPGKAPRLLIYGTSNLQSGVPSRFSGSGSGTDFTLTISSLQPEDFATYYCQPSFYFPYTFGQGTKVEIRR

SEQ ID NO: 251 - protein, 108 aa, Homo sapiens
DIQMTQSPSSLSASVGDRVTITCRASQDIYLNLDWYQQKPGKAPKLLIRTSSDLQSGVPSRFSGSGSGTDFTLTISSLQPEDFATYYCQPSFYFPYTFGQGTKVEIRR

SEQ ID NO: 252 - protein, 108 aa, Homo sapiens
DIQMTQSPSSLSASVGDRVTITCRASQDIYLNLDWYQQKPGKAPKLLITVGSELQSGVPSRFSGSGSGTDFTLTISSLQPEDFATYYCQPSFYFPYTFGQGTKVEIRR

SEQ ID NO: 253 - protein, 108 aa, Homo sapiens
DIQMTQSPSSLSASVGDRVTITCRASQDIYLNLDWYQQKPGKAPKLLIALVSELQSGVPSRFSGSGSGTDFTLTISSLQPEDFATYYCQPSFYFPYTFGQGTKVEIRR

SEQ ID NO: 254 - protein, 108 aa, Homo sapiens
DIQMTQSPSSLSASVGDRVTITCRASQDIYLNLDWYQQKPGKAPKLLIHHCSELQSGVPSRFSGSGSGTDFTLTISSLQPEDFATYYCQPSFYFPYTFGQGTKVEIRR

SEQ ID NO: 255 - protein, 108 aa, Homo sapiens
DIQMTQSPSSLSASVGDRVTITCRASQDIYLNLDWYQQKPGKASKLLISSSSDLQSGVPSRFSGSGSGTDFTLTISSLQPEDFATYYCQPSFYFPYTFGQGTKVEIRR

SEQ ID NO: 256 - protein, 108 aa, Homo sapiens
DIQMTQSPSSLSASVGDRVTITCRASQDIYLNLDWYQQKPGKAPKLLISLVSDLQSGVPSRFSGSGSGTDFTLTISSLQPEDFATYYCQPSFYFPYTFGQGTKVEIRR

SEQ ID NO: 257 - protein, 108 aa, Homo sapiens
DIQMTQSPPSLSASVGDRVTITCRASQDIYLNLDWYQQKPGKAPKLLISLSSDLQSGVPSRFSGSGSGTDFTLTISSLQPEDFATYYCQPSFYFPYAFGQGTKVEIRR

SEQ ID NO: 258 - protein, 108 aa, Homo sapiens
DIQMTQSPSSLSASVGDRVTITCRASQDIYLNLDWYQQKPGKAPKLLILYSSELQSGVPSRFSGSGSGTDFTLTISSLQPEDFATYYCQPSFYFPYTFGQGTKVEIRR

SEQ ID NO: 259 - protein, 108 aa, Homo sapiens; identical to SEQ ID NO: 4

SEQ ID NO: 260 - protein, 108 aa, Homo sapiens
DIQMTQSPSSLSASVGDRVTITCRASQDIYLNLDWYQQKPGKAPKLLISWSSFLQSGVPSRFSGSGSGTDFTLTISSLQPEDFATYYCQPSFYFPYTFGQGTKVEIRR

SEQ ID NO: 261 - protein, 108 aa, Homo sapiens
DIQMTQSPSSLSASVGDRVTITCRASQDIYLNLDWYQQKPGEAPKLLIYGTSDLQSGVPSRFSGSGSGTDFTLTISSLQPEDFATYYCQPSFYFPYTFGQGTKVEIRR

SEQ ID NO: 262 - protein, 108 aa, Homo sapiens
DIQMTQSPSSLSASVGDRVTITCRASQDIYLNLDWYQQKPGKAPKLLIYGTSDLQSGVPSRFSGSGYGTDFTLTISSLQPEDFATYYCQPSFYFPYTFGQGTKVEIRR

SEQ ID NO: 263 - protein, 108 aa, Homo sapiens
DIQMTQSPSSLSASVGDRVTITCRASQDIYLNLDWYQQKPGEAPKLLINFGSELQSGVPSRFSGSGSGTDFTLTISSLQPEDFATYYCQPSFYFPYTFGQGTKVEIRR

SEQ ID NO: 264 - protein, 108 aa, Homo sapiens; identical to SEQ ID NO: 5

SEQ ID NO: 265 - protein, 108 aa, Homo sapiens
DIQMTQSPSSLSASVGDRVTITCRASQDIYLNLDWYQQKPGKAPKLLIYFGSELQSGVPSRFSGSGSGTDFTLTISSLQPEDFATYYCQPSFYFPYTFGQGTKVEIRR

SEQ ID NO: 266 - protein, 108 aa, Homo sapiens; identical to SEQ ID NO: 6

SEQ ID NO: 267 - protein, 108 aa, Homo sapiens; identical to SEQ ID NO: 7

SEQ ID NO: 268 - protein, 108 aa, Homo sapiens
DIQMTQSPSSLSASVGDRVTITCRASQLIYLNLDWYQQKPGKAPKLLINFGSELQSGVPSRFSGSGYGTDFTLTISSLQPEDFATYYCQPSFYFPYTFGQGTKVEIKR

SEQ ID NO: 269 - protein, 108 aa, Homo sapiens
DIQMTQSPSSLSASVGDRVTITCRASQRIYLNLDWYQQKPGKAPKLLINFGSELQSGVPSRFSGSGYGTDFTLTISSLQPEDFATYYCQPSFYFPYTFGQGTKVEIKR

SEQ ID NO: 270 - protein, 108 aa, Homo sapiens
DIQMTQSPSSLSASVGDRVTITCRASQAIYLNLDWYQQKPGKAPKLLINFGSELQSGVPSRFSGSGYGTDFTLTISSLQPEDFATYYCQPSFYFPYTFGQGTKVEIKR

SEQ ID NO: 271 - protein, 108 aa, Homo sapiens
DIQMTQSPSSLSASVGDRVTITCRASQQIYLNLDWYQQKPGKAPKLLINFGSELQSGVPSRFSGSGYGTDFTLTISSLQPEDFATYYCQPSFYFPYTFGQGTKVEIKR

SEQ ID NO: 272 - protein, 108 aa, Homo sapiens
DIQMTQSPSSLSASVGDRVTITCRASQTIYLNLDWYQQKPGKAPKLLINFGSELQSGVPSRFSGSGYGTDFTLTISSLQPEDFATYYCQPSFYFPYTFGQGTKVEIKR

SEQ ID NO: 273 - protein, 108 aa, Homo sapiens
DIQMTQSPSSLSASVGDRVTITCRASQSIYLNLDWYQQKPGKAPTLLINFGSELQSGVPSRFSGSGYGTDFTLTISSLQPEDFATYYCQPSFYFPYTFGQGTKVEIKR

SEQ ID NO: 274 - protein, 108 aa, Homo sapiens
DIQMTQSPSSLSASVGDRVTITCRASQDIYLNLDWYQQKPGKAPKLLINFGSELQSGVPSRFSGSGYGTDFTLTISSLQPEDFATYYCQPAFYFPYTFGQGTKVEIKR

SEQ ID NO: 275 - protein, 108 aa, Homo sapiens
DIQMTQSPSSLSASVGDRVTITCRASQDIYLNLDWYQQKPGKAPKLLINFGSELQSGVPSRFSGSGYGTDFTLTISSLQPEDFATYYCQPGFYFPYTFGQGTKVEIKR

SEQ ID NO: 276 - protein, 108 aa, Homo sapiens
DIQMTQSPSSLSASVGDRVTITCRASQDIYLNLDWYQQKPGKAPKLLINFGSELQSGVPSRFSGSGYGTDFTLTISSLQPEDFATYYCQPSYYFPYTFGQGTKVEIKR

SEQ ID NO: 277 - protein, 108 aa, Homo sapiens
DIQMTQSPSSLSASVGDRVTITCRASQDIYLNLDWYQQKPGKAPKLLINFGSELQSGVPSRFSGSGYGTDFTLTISSLQPEDFATYYCQPSGYFPYTFGQGTKVEIKR

SEQ ID NO: 278 - protein, 108 aa, Homo sapiens
DIQMTQSPSSLSASVGDRVTITCRASQDIYLNLDWYQQKPGKAPKLLINFGSELQSGVPSRFSGSGYGTDFTLTISSLQPEDFATYYCQPSFAFPYTFGQGTKVEIKR

SEQ ID NO: 279 - protein, 108 aa, Homo sapiens
DIQMTQSPSSLSASVGDRVTITCRASQDIYLNLDWYQQKPGKAPKLLINFGSELQSGVPSRFSGSGYGTDFTLTISSLQPEDFATYYCQPSFLFPYTFGQGTKVEIKR

SEQ ID NO: 280 - protein, 108 aa, Homo sapiens
DIQMTQSPSSLSASVGDRVTITCRASQDIYLNLDWYQQKPGKAPKLLINFGSELQSGVPSRFSGSGYGTDFTLTISSLQPEDFATYYCQPSFYHPYTFGQGTKVEIKR

SEQ ID NO: 281 - protein, 108 aa, Homo sapiens
DIQMTQSPSSLSASVGDRVTITCRASQDIYLNLDWYQQKPGKAPKLLINFGSELQSGVPSRFSGSGYGTDFTLTISSLQPEDFATYYCQPSFYWPYTFGQGTKVEIKR

SEQ ID NO: 282 - protein, 108 aa, Homo sapiens
DIQMTQSPSSLSASVGDRVTITCRASQDIYLNLDWYQQKPGKAPKLLINFGSELQSGVPSRFSGSGYGTDFTLTISSLQPEDFATYYCQPSFYFPPTFGQGTKVEIKR

SEQ ID NO: 283 - protein, 108 aa, Homo sapiens
DIQMTQSPSSLSASVGDRVTITCRASQDIYLNLDWYQQKPGKAPKLLINFGSELQSGVPSRFSGSGWGTDFTLTISSLQPEDFATYYCQPSFYFPYTFGQGTKVEIKR

SEQ ID NO: 284 - protein, 108 aa, Homo sapiens
DIQMTQSPSSLSASVGDRVTITCRASQDIFLNLDWYQQKPGKAPKLLINFGSELQSGVPSRFSGSGYGTDFTLTISSLQPEDFATYYCQPSFYFPYTFGQGTKVEIKR

SEQ ID NO: 285 - protein, 108 aa, Homo sapiens
DIQMTQSPSSLSASVGDRVTITCRASQDIYLNLMWYQQKPGKAPKLLINFGSELQSGVPSRFSGSGYGTDFTLTISSLQPEDFATYYCQPSFYFPYTFGQGTKVEIKR

SEQ ID NO: 286 - protein, 108 aa, Homo sapiens
DIQMTQSPSSLSASVGDRVTITCRASQDIYLNLLWYQQKPGKAPRLLINFGSELQSGVPSRFSGSGYGTDFTLTISSLQPEDFATYYCQPSFYFPYTFGQGTKVEIKR

SEQ ID NO: 287 - protein, 108 aa, Homo sapiens
DIQMTQSPSSLSASAGDRVTITCRASQDIYLNLMWYQQKPGKAPKLLINFGSELQSGVPSRFSGSGYGTDFTLTISSLQPEDFATYYCQPSFYFPYTFGQGTKVEIKR

SEQ ID NO: 288 - protein, 108 aa, Homo sapiens
DIQMTQSPSSLSASVGDRVTITCRASQDIYLNLAWYQQKPGKAPKLLINFGSELQSGVPSRFSGSGYGTDFTLTISSLQPEDFATYYCQPSFYFPYTFGQGTKVEIKR

SEQ ID NO: 289 - protein, 108 aa, Homo sapiens
DIQMTQSPSSLSASVGDRVTITCRASQDIYLNLLWYQQKPGKAPKLLINFGSELQSGVPSRFSGSGYGTDFTLTISSLQPEDFATYYCQPSFYFPYTFGQGTKVEIKR

SEQ ID NO: 290 - protein, 108 aa, Homo sapiens
DIQMTQSPSSLSASVGDRVTITCRASQDIYLNLTWYQQKPGKAPKLLINFGSELQSGVPSRFSGSGYGTDFTLTISSLQPDDFATYYCQPSFYFPYTFGQGTKVEIKR

SEQ ID NO: 291 - protein, 108 aa, Homo sapiens
DIQMTQSPSSLSASVGDRVTITCRASQDIYLNLPWYQQKPGKAPKLLINFGSELQSGVPSRFSGSGYGTDFTLTISSLQPEDFATYYCQPSFYFPYTFGQGTKVEIKR

SEQ ID NO: 292 - protein, 108 aa, Homo sapiens
DIQMTQSPSSLSASVGDRVTITCRASQDIYLNLKWYQQKPGKAPKLLINFGSELQSGVPSRFSGSGYGTDFTLTISSLQPEDFATYYCQPSFYFPYTFGQGTKVEIKR

SEQ ID NO: 293 - protein, 108 aa, Homo sapiens
DIQMTQSPSSLSASVGDRVTITCRASQDIYLNLTWYQQKPGKAPKLLINFGSELQSGVPSRFSGSGYGTDFTLTISSLQPEDFATYYCQPSFYFPYTFGQGTKVEIKR

SEQ ID NO: 294 - protein, 108 aa, Homo sapiens
DIQMTQSPSSLSASVGDRVTITCRASQDIYLNLEWYQQKPGKAPKLLINFGSELQSGVPSRFSGSGYGTDFTLTISSLQPEDFATYYCQPSFYFPYTFGQGTKVEIKR

SEQ ID NO: 295 - protein, 108 aa, Homo sapiens
DIQMTQSPSSLSASVGDRVTITCRASQDIYLNLDWYQQKPGKAPKLLINFGSELTSGVPSRFSGSGYGTDFTLTISSLQPEDFATYYCQPSFYFPYTFGQGTKVEIKR

SEQ ID NO: 296 - protein, 108 aa, Homo sapiens
DIQMTQSPSSLSASVGDRVTITCRASQDIYLNLDWYQQKPGKAPKLLINFGSELNSGVPSRFSGSGYGTDFTLTISSLQPEDFATYYCQPSFYFPYTFGQGTKVEIKR

SEQ ID NO: 297 - protein, 108 aa, Homo sapiens
DIQMTQSPSSLSASVGDRVTITCRASQDIYLNLDWYQQKPGKAPKLLINFGSELYSGVPSRFSGSGYGTDFTLTISSLQPEDFATYYCQPSFYFPYTFGQGTKVEIKR

SEQ ID NO: 298 - protein, 108 aa, Homo sapiens
DIQMTQSPSSLSASVGDRVTITCRASQDIYLNLDWYQQKPGKAPKLLINFGSELFSGVPSRFSGSGYGTDFTLTISSLQPEDFATYYCQPSFYFPYTFGQGTKVEIKR

SEQ ID NO: 299 - protein, 108 aa, Homo sapiens
DIQMTQSPSSLSASVGDRVTITCRASQDIYLNLDWYQQKPGKAPKLLINFGSELLSGVPSRFSGSGYGTDFTLTISSLQPEDFATYYCQPSFYFPYTFGQGTKVEIKR

SEQ ID NO: 300 - protein, 108 aa, Homo sapiens
DIQMTQSPSSLSASVGDRVTITCRASQDIYLNLDWYQQKPGKAPKLLINFGSELRSGVPSRFSGSGYGTDFTLTISSLQPEDFATYYCQPSFYFPYTFGQGTKVEIKR

SEQ ID NO: 301 - protein, 108 aa, Homo sapiens
DIQMTQSPSSLSASVGDRVTITCRASQDIYLNLDWYQQKPGKAPKLLINFGSELPSGVPSRFSGSGYGTDFTLTISSLQPEDFATYYCQPSFYFPYTFGQGTKVEIKR

SEQ ID NO: 302 - protein, 108 aa, Homo sapiens
DIQMTQSPSSLSASVGDRVTITCRASQDIYLNLDWYQQKPGKAPKPLINFGSELQPGVPSRFSGSGYGTDFTLTISSLQPEDFATYYCQPSFYFPYTFGQGTKVEIKR

SEQ ID NO: 303 - protein, 108 aa, Homo sapiens
DIQMTQSPSSLSASVGDRVTITCRASQDIYLNLDWYQQKPGKAPKLLINFGSELQPGVPSRFSGSGYGTDFTLTISSLQPEDFATYYCQPSFYFPYTFGQGTKVEIKR

SEQ ID NO: 304 - protein, 108 aa, Homo sapiens
DIQMTQSPSSLSASVGDRVTITCRASQDIYLNLDWYQQKPGKAPKLLINFGSELQHGVPSRFSGSGYGTDFTLTISSLQPEDFATYYCQPSFYFPYTFGQGTKVEIKR

SEQ ID NO: 305 - protein, 108 aa, Homo sapiens
DIQMTQSPSSLSASVGDRVTITCRASQDIYLNLDWYQQKPGKAPKLLINFGSELQLGVPSRFSGGGYGTDFTLTISSLQPEDFATYYCQPSFYFPYTFGQGTKVEIKR

SEQ ID NO: 306 - protein, 108 aa, Homo sapiens
DIQMTQSPSSLSASVGDRVTITCRASQDIYLNLDWYQQKPGKAPKLLINFGSELQKGVPSRFSGSGYGTDFTLTISSLQPEDFATYYCQPSFYFPYTFGQGTKVEIKR

SEQ ID NO: 307 - protein, 108 aa, Homo sapiens
DIQMTQSPSSLSASVGDRVTITCRASQDIYLNLDWYQQKPGKAPKLLINFGSELQFGVPSRFSGSGYGTDFTLTISSLQPEDFATYYCQPSFYFPYTFGQGTKVEIKR

SEQ ID NO: 308 - protein, 108 aa, Homo sapiens
DIQMTQSPSSLSASVGDRVTITCRASQDIYLNLDWYQQKPGKAPKLLINFGSELQQGVPSRFSGSGYGTDFTLTISSLQPEDFATYYCQPSFYFPYTFGQGTKVEIKR

SEQ ID NO: 309 - protein, 108 aa, Homo sapiens
DIQMTQSPSSLSASVGDRVTITCRASQDIYLNLDWYQQKPGKAPKLLINFGSELQSGVPSRFSGSGYGTDFTLTISSLQPEDFATYYCTPSFYFPYTFGQGTKVEIKR

SEQ ID NO: 310 - protein, 108 aa, Homo sapiens
DIQMTQSPSSLSASVGDRVTITCRASQDIYLNLDWYQQKPGKAPKLLINFGSELQSGVPSRFSGSGYGTDFTLTISSLQPEDFATYYCKPSFYFPYTFGQGTKVEIKR

SEQ ID NO: 311 - protein, 108 aa, Homo sapiens
DIQMTQSPSSLSASVGDRVTITCRASQDIYLNLDWYQQKPGKAPKLLINFGSELQSGVPSRFSGSGYGTDFTLTISSLQPEDFAMYYCAPSFYFPYTFGQGTKVEIKR

SEQ ID NO: 312 - protein, 108 aa, Homo sapiens
DIQMTQSPSSLSASVGDRVTITCRASQDIYLNLDWYQQKPGKAPKLLINFGSELQSGVPSRFSGSGYGTDFTLTISSLQPEDFATYYCSPSFYFPYTFGQGTKVEIKR

SEQ ID NO: 313 - protein, 108 aa, Homo sapiens
DIQMTQSPSSLSASVGDRVTITCRASQDIYLNLDWYQQKPGKAPKLLINFGSELQSGVPSRFSGSGYGTDFTLTISSLQPEDFATYYCLPSFYFPYTFGQGTKVEIKR

SEQ ID NO: 314 - protein, 108 aa, Homo sapiens
DIQMTQSPSSLSASVGDRVTITCRASQDIYLNLDWYQQKPGKAPKLLINFGSELQSGVPSRFSGSGYGTDFTLTISSLQPEDFATYYCQASFYFPYTFGQGTKVEIKR

SEQ ID NO: 315 - protein, 108 aa, Homo sapiens
DIQMTQSPSSLSASVGDRVTITCRASQDIYLNLDWYQQKPGKAPKLLINFGSELQSGVPSRFSGSGYGTDFTLTISGLQPEDFATYYCQASFYFPYTFGQGTKVEIKR

SEQ ID NO: 316 - protein, 108 aa, Homo sapiens
DIQMTQSPSSLSASVGDRVTITCRASQDIYLNLDWYQQKPGKAPKLLINFGSELQSGVPSRFSGSGYGTDFTLTISSLQPEDFATYYCQGSFYFPYTFGQGTKVEIKR

SEQ ID NO: 317 - protein, 108 aa, Homo sapiens
DIQMTQSPSSLSASVGDRVTITCRASQDIYLNLDWYQQKPGKAPKLLISFGSELQSGVPSRFSGSGYGTDFTLTISSLQPEDFATYYCQPSFYFPYTFGQGTKVEIKR

SEQ ID NO: 318 - protein, 108 aa, Homo sapiens
DIQMTQSPSSLSASVGDRVTITCRASQDIYLNLDWYQQKPGKAPKLLITFGSELQSGVPSRFSGSGYGTDFTLTISSLQPEDFATYYCQPSFYFPYTFGQGTKVEIKR

SEQ ID NO: 319 - protein, 108 aa, Homo sapiens
DIQMTQSPSSLSASVGDRVTITCRASQDIYLNLDWYQQKPGKAPKLLIMFGSELQSGVPSRFSGSGYGTDFTLTISSLQPEDFATYYCQPSFYFPYTFGQGTKVEIKR

SEQ ID NO: 320 - protein, 108 aa, Homo sapiens
DIQMTQSPSSLSASVGDRVTITCRASQDIYLNLDWYQQKPGKAPKLLIVFGSELQSGVPSRFSGSGYGTDFTLTISSLQPEDFATYYCQPSFYFPYTFGQGTKVEIKR

SEQ ID NO: 321 - protein, 108 aa, Homo sapiens
DIQMTQSPSSLSASVGDRVTITCRASQDIYLNLDWYQQKPGKAPKLLIKFGSELQSGVPSRFSGSGYGTDFTLTISSLQPEDFATYYCQPSFYFPYTFGQGTKVEIKR

SEQ ID NO: 322 - protein, 108 aa, Homo sapiens
DIQMTQSPSSLSASVGDRVTITCRASQDIYLNLDWYQQKPGKAPKLLISFGSELQSGVPSRFRGSGYGTDFTLTISSLQPEDFATYYCQPSFYFPYTFGQGTKVEIKR

SEQ ID NO: 323 - protein, 108 aa, Homo sapiens
DIQMTQSPSSLSASVGDRVTITCRASQDIYLNLDWYQQKPGKAPKLLINYGSELQSGVPSRFSGSGYGTDFTLTISSLQPEDFATYYCQPSFYFPYTFGQGTKVEIKR

SEQ ID NO: 324 - protein, 108 aa, Homo sapiens
DIQMTQSPSSLSASVGDRVTITCRASQDIYLNLDWYQQKPGKAPKLLINSGSELQSGVPSRFSGSGYGTDFTLTISSLQPEDFATYYCQPSFYFPYTFGQGTKVEIKR

SEQ ID NO: 325 - protein, 108 aa, Homo sapiens
DIQMTQSPSSLSASVGDRVTITCRASQDIYLNLDWYQQKPGKAPKLLINLGSELQSGVPSRFSGSGYGTDFTLTISSLQPEDFATYYCQPSFYFPYTFGQGTKVEIKR

SEQ ID NO: 326 - protein, 108 aa, Homo sapiens
DIQMTQSPSSLSASVGDRVTITCRASQDIYLNLDWYQQKPGKAPKLLINGGSELQSGVPSRFSGSGYGTDFTLTISSLQPEDFATYYCQPSFYFPYTFGQGTKVEIKR

SEQ ID NO: 327 - protein, 108 aa, Homo sapiens
DIQMTQSPSSLSASVGDRVTITCRASQDIYPNLDWYQQKPGKAPKLLINSGSELQSGVPSRFSGSGYGTDFTLTISSLQPEDFATYYCQPSFYFPYTFGQGTKVEIKR

SEQ ID NO: 328 - protein, 108 aa, Homo sapiens; identical to SEQ ID NO: 325

SEQ ID NO: 329 - protein, 108 aa, Homo sapiens
DIQMTQSPSSLSASVGDRVTITCRASQDIYLNLDWYQQKPGKAPKLLINFSSELQSGVPSRFSGSGYGTDFTLTISSLQPEDFATYYCQPSFYFPYTFGQGTKVEIKR

SEQ ID NO: 330 - protein, 108 aa, Homo sapiens
DIQMTQSPSSLSASVGDRVTITCRASQDIYLNLDWYQQKPGKAPKLLINFASELQSGVPSRFSGSGYGTDFTLTISSLQPEDFATYYCQPSFYFPYTFGQGTKVEIKR

SEQ ID NO: 331 - protein, 108 aa, Homo sapiens
DIQMTQSPSSLSASVGDRVTITCRASQDIYLNLDWYQQKPGKAPKLLINFVSELQSGVPSRFSGSGYGTDFTLTISSLQPEDFATYYCQPSFYFPYTFGQGTKVEIKR

SEQ ID NO: 332 - protein, 108 aa, Homo sapiens
DIQMTQSPSSLSASVGDRVTITCRASQDIYLNLDWYQQKPGKAPKLLINFGSSLQSGVPSRFSGSGYGTDFTLTISSLQPEDFATYYCQPSFYFPYTFGQGTKVEIKR

SEQ ID NO: 333 - protein, 108 aa, Homo sapiens
DIQMTQSPSSLSASVGDRVTITCRASQDIYLNLDWYQQKPGKAPKLLINFGSALQSGVPSRFSGSGYGTDFTLTISSLQPEDFATYYCQPSFYFPYTFGQGTKVEIKR

SEQ ID NO: 334 - protein, 108 aa, Homo sapiens
DIQMTQSPSSLSASVGDRVTITCRASQDIYLNLDWYQQKPGKAPKLLINFGSTLQSGVPSRFSGSGYGTDFTLTISSLQPEDFATYYCQPSFYFPYTFGQGTKVEIKR

SEQ ID NO: 335 - protein, 108 aa, Homo sapiens
DIQMTQSPSSLSASVGDRVTITCRASQDIYLNLDWYQQKPGKAPKLLINFGSDLQSGVPSRFSGSGYGTDFTLTISSLQPEDFATYYCQPSFYFPYTFGQGTKVEIKR

SEQ ID NO: 336 - protein, 108 aa, Homo sapiens
DIQMTQSPSSLSASVGDRVTITCRASQDIYLNLDWYQQKPGKAPKLLISFGSELRSGVPSRFSGSGYGTDFTLTISSLQPEDFATYYCQPSFYFPYTFGQGTKVEIKR

SEQ ID NO: 337 - protein, 108 aa, Homo sapiens
DIQMTQSPSSLSASVGDRVTITCRASQDIYLNLDWYQQKPGKAPKLLISFGSELQPGVPSRFSGSGYGTDFTLTISSLQPEDFATYYCQPSFYFPYTFGQGTKVEIKR

SEQ ID NO: 338 - protein, 108 aa, Homo sapiens
DIQMTQSPSSLSASVGDRVTITCRASQDIYLNLDWYQQKPGKAPKLLISFGSELRPGVPSRFSGSGYGTDFTLTISSLQPEDFATYYCQPSFYFPYTFGQGTKVEIKR

SEQ ID NO: 339 - protein, 108 aa, Homo sapiens
DIQMTQSPSSLSASVGDRVTITCRASQDIYLNLDWYQQKPGKAPKLLINFGSELRPGVPSRFSGSGYGTDFTLTISSLQPEDFATYYCQPSFYFPYTFGQGTKVEIKR

SEQ ID NO: 340 - protein, 108 aa, Homo sapiens
DIQMTQSPSSLSASVGDRVTITCRASQDIYLNLDWYQQKPGKAPKLLISFGSELQKGVPSRFSGSGYGTDFTLTISSLQPEDFATYYCQPSFYFPYTFGQGTKVEIKR

SEQ ID NO: 341 - protein, 108 aa, Homo sapiens
DIQMTQSPSSLSASVGDRVTITCRASQDIYLNLDWYQQKPGKAPKLLISFGSELRKGVPSRFSGSGYGTDFTLTISSLQPEDFATYYCQPSFYFPYTFGQGTKVEIKR

SEQ ID NO: 342 - protein, 108 aa, Homo sapiens
DIQMTQSPSSLSASVGDRVTITCRASQDIYLNLDWYQQKPGKAPKLLINFGSELRKGVPSRFSGSGYGTDFTLTISSLQPEDFATYYCQPSFYFPYTFGQGTKVEIKR

SEQ ID NO: 343 - protein, 108 aa, Homo sapiens
DIQMTQSPSSLSASVGDRVTITCRASQTIYLNLDWYQQKPGKAPKLLISFGSELQKGVPSRFSGSGYGTDFTLTISSLQPEDFATYYCQPSFYFPYTFGQGTKVEIKR

SEQ ID NO: 344 - protein, 108 aa, Homo sapiens
DIQMTQSPSSLSASVGDRVTITCRASQTIYLNLDWYQQKPGKAPKLLINFGSELQSGVPSRFSGSGYGTDFTLTISSLQPEDFATYYCQPAFYFPYTFGQGTKVEIKR

SEQ ID NO: 345 - protein, 108 aa, Homo sapiens
DIQMTQSPSSLSASVGDRVTITCRASQDIYLNLDWYQQKPGKAPKLLISFGSELQKGVPSRFSGSGYGTDFTLTISSLQPEDFATYYCQQAFYFPYTFGQGTKVEIKR

SEQ ID NO: 346 - protein, 108 aa, Homo sapiens
DIQMTQSPSSLSASVGDRVTITCRASQTIYLNLDWYQQKPGKAPKLLISFGSELQKGVPSRFSGSGYGTDFTLTISSLQPEDFATYYCQQAFYFPYTFGQGTKVEIKR

SEQ ID NO: 347 - protein, 108 aa, Homo sapiens
DIQMTQSPSSLSASVGDRVTITCRASQQIYNALRWYQQKPGKARKLLIYHKSQLQSGVPSRFSGSGSGTDFTLTISSLQPEDFATYYCQQTYSFPHTFGQGTKVEIKR

SEQ ID NO: 348 - protein, 108 aa, Homo sapiens
DIQMTQSPSSLSASVGDRVTITCRASQDIWLNLSWYQQKPGKAPKLLIYDGSTLQSGVPSRFSGSGSGTDFTLTISSLQPEDFATYYCQPSFIWPYTFGQGTKVEIKR

SEQ ID NO: 349 - protein, 108 aa, Homo sapiens
DIKMTQSPSSLSASVGDRVTITCRASQNIGRELRWYQQKPGKAPKLLIYHASHLQSGVPSRFSGSGSGTDFTLTISSLQPEDFATYYCQQYYYFPLTFGQGTKVEIKR

SEQ ID NO: 350 - DNA, 324 bp, Homo sapiens
gacatccagatgacccagtctccatcctccctgtcagcatctgtaggagaccgtgtcaccatcacttgccgggcaagtcagtggattggtagggagttacgttggtaccagcagaaaccagggaaagcccctatgttcctgatctatcatgcgtccaggttgcaaagaggggtcccatcacgtttcagtggcagtggatctgggacagatttcactctcactatcagcagtctgcaacctgaagattttgctacgtactactgtcaacagtatcatgggtggcctctgacgttcggccaagggaccaaggtggaaatcaaacgg

SEQ ID NO: 351 - DNA, 324 bp, Homo sapiens
gacatccagatgacccagtctccatcctccctgtcagcatctgtaggagaccgtgtcaccatcacttgccgggcaagtcagtggattggtagggagttacgttggtaccagcagaaaccagggaaagcccctaagttcctgatctatcatgcgtccaggttgcaaagaggggtcccatcacgtttcagtggcagtggatctgggacagatttcactctcactatcagcagtctgcaacctgaagattttgctacgtactactgtcaacagtatcatgggtggcctctgacgttcggccaagggaccaaggtggaaatcaaacgg

SEQ ID NO: 352 - DNA, 324 bp, Homo sapiens
gacatccagatgacccagtctccatcctccctgtctgcatctgtaggagaccgtgtcaccatcacttgccgggcaagtcaggatatttacctgaatttagactggtatcagcagaaaccagggaaagcccctaagctcctgatctatggtacgtccgatttgcaaagtggggtcccatcacgtttcagtggcagtggatctgggacagatttcactctcaccatcagcagtctgcaacctgaagatttcgctacgtactactgtcaaccgtctttttacttcccttatacgttcggccaagggaccaaggtggaaatcagacgg

SEQ ID NO: 353 - DNA, 324 bp, Homo sapiens
gacatccagatgacccagtctccatcctccctgtctgcatctgtaggagaccgtgtcaccatcacttgccgggcaagtcaggatatttacctgaatttagactggtatcagcagaaaccagggaaagcccctaagctcctgatcaattttggttccgagttgcaaagtggtgtcccatcacgtttcagtggcagtggatctgggacagatttcactctcaccatcagcagtctgcaacctgaagatttcgctacgtactactgtcaaccgtctttttacttcccttatacgttcggccaagggaccaaggtggaaatcagacgg

SEQ ID NO: 354 - DNA, 324 bp, Homo sapiens
gacatccagatgacccagtctccatcctccctgtctgcatctgtaggagaccgtgtcaccatcacttgccgggcaagtcaggatatttacctgaatttagactggtatcagcagaaaccagggaaagcccctaagctcctgatcaattttggttccgagttgcaaagtggtgtcccatcacgtttcagtggcagtggatatgggacagatttcactctcaccatcagcagtctgcaacctgaagatttcgctacgtactactgtcaaccgtctttttacttcccttatacgttcggccaagggaccaaggtggaaatcagacgg

SEQ ID NO: 355 - DNA, 324 bp, Homo sapiens
gacatccagatgacccagtctccatcctccctgtctgcatctgtaggagaccgtgtcaccatcacttgccgggcaagtcaggatatttacctgaatttagactggtatcagcagaaaccagggaaagcccctaagctcctgatcaattttggttccgagttgcaaagtggtgtcccatcacgtttcagtggcagtggatctgggacagatttcactctcaccatcagcagtctgcaacctgaagatttcgctacgtactactgtcaaccgtctttttacttcccttatacgttcggccaagggaccaaggtggaaatcaaacgg

SEQ ID NO: 356 - DNA, 324 bp, Homo sapiens
gacatccagatgacccagtctccatcctccctgtctgcatctgtaggagaccgtgtcaccatcacttgccgggcaagtcaggatatttacctgaatttagactggtatcagcagaaaccagggaaagcccctaagctcctgatcaattttggttccgagttgcaaagtggtgtcccatcacgtttcagtggcagtggatatgggacagatttcactctcaccatcagcagtctgcaacctgaagatttcgctacgtactactgtcaaccgtctttttacttcccttatacgttcggccaagggaccaaggtggaaatcaaacgg

SEQ ID NO: 357 - DNA, 324 bp, Homo sapiens
gacatccagatgacccagtctccatcctccctgtctgcatctgtaggagaccgtgtcaccatcacttgccgggcaagtcagagcatttattattttttacattggtaccagcagaaaccagggaaagcccctaagctcctgatctatcgggcatcctctttgcaaagtggggtcccatcacgtttcagtggcagtggatctgggacagatttcactctcaccatcagcagtctgcaacctgaagattttgctacgtactactgtcaacaggtgtggcgtcctcctcttacgttcggccaagggaccaaggtggaaatcaaacgg

SEQ ID NO: 358 - DNA, 324 bp, Homo sapiens
gacatccagatgacccagtctccatcctccctgtctgcatctgtaggagaccgtgtcaccatcacttgccgggcaagtcagagcatttatcagagtttagattggtaccagcagaaaccagggaaagcccctaagctcctgatctattatgcatccgtgttgcaaagtggggtcccatcacgtttcagtggcagtggatctgggacagatttcactctcaccatcagcagtctgcaacctgaagattttgctacgtactactgtcaacagctgtctcgtccgccttttacgttcggccaagggaccaaggtggaaatcaaacgg

SEQ ID NO: 359 - DNA, 324 bp, Homo sapiens
gacatccagatgacccagtctccatcctccctgtctacatctgtaggagaccgtgtcaccatcacttgccgtgcaagtcagagcattgaggagatgttatattggtaccagcagaaaccagggaaagcccctaagctcctgatctataatgcatccaggttgcaaagtggggtcccatcacgtttcagtggcagtggatctgggacagatttcattctcaccatcagcagtctgcaacctgaagattttgctacgtactactgtcgacaggtggtgggtacgcctcatacgttcggccaagggaccaaggtggaaatcaaacgg

SEQ ID NO: 360 - DNA, 324 bp, Homo sapiens
gacatccagatgacccagtctccatcctccctgtctgcatctgtaggagaccgtgtcaccatcacttgccgggcaagtcagagcattgatgattatttaaattggtaccagcagaaaccagggaaagcccctaagctcctgatctattgggcatccaggttgcaaagtggggtcccatcacgtttcagtggcagtggatctgggacagatttcactctcaccatcagcagtctgcaacctgaagattttgctacgtactactgtcaacagaggtggttgacgccttcgacgttcggccaagggaccaaggtggaaatcaaacgg

SEQ ID NO: 361 - DNA, 324 bp, Homo sapiens
gacatccagatgacccagtctccatcctccctgtctgcatctgtaggagaccgtgtcaccatcacttgccgggcaagtcagagcattgaggagatgttatattggtaccagcagaaaccagggaaagcccctaagctcctgatctataatgcatccaggttgcaaagtggggtcccatcacgtttcagtggcagtggatctgggacagatttcactctcaccatcagcagtctgcaacctgaagattttgctacgtactactgtcgacaggtggtgggtacgcctcatacgttcggccaagggaccaaggtggaaatcaaacgg

SEQ ID NO: 362 - DNA, 324 bp, Homo sapiens
gacatccagatgacccagtctccatcctccctgtctgcatctgtaggagaccgtgtcaccatcacttgccgggcaagtcagagcattgatgattatttaaattggtaccagcagaaaccagggaaagcccctaagctcctgatctattgggcatccaggttgcaaagtggggtcccatcacgtttcagtggcagtggatctgggacagatttcactctcaccatcagtagtctgcaacctgaagattttgctacgtactactgtcaacagaagtggatgggtcctcatacgttcggccaagggaccaaggtggaaatcaaacgg

SEQ ID NO: 363 - DNA, 324 bp, Homo sapiens
gacatccagatgacccagtctccatcctccctgtctgcatctgtaggagaccgtgtcaccatcacttgccgggcaagtcagaacattgattgggggttagattggtaccagcagaaaccagggaaagcccctaagctcctgatctatatggcatcccgtttgcaaagtggggtcccatcacgtttcagtggcagtggatctgggacagatttcactctcaccatcagcagtctgcaacctgaagattttgctacgtactactgtcaacagttgagtatgtggccttttacgttcggccaagggaccaaggtggaaatcaaacgg

SEQ ID NO: 364 - DNA, 324 bp, Homo sapiens
gacatccagatgacccagtctccatcctccctgtctgcatctgtaggagaccgtgtcaccatcacttgccgggcaagtcagagcattctggattatttaagttggtaccagcagaaaccagggaaagcccctaagctcctgatctattgggcatccaagttgcaaagtggggtcccatcacgtttcagtggcagtggatctgggacagatttcactctcaccatcagcagtctgcaacctgaagattttgctacgtactactgtcaacagaagtggatgggtcctcatacgttcggccaagggaccaaggtggaaatcaaacgg

SEQ ID NO: 365 - DNA, 324 bp, Homo sapiens
gacatccagatgacccagtctccatcctccctgtctgcatctgtaggagaccgtgtcaccatcacttgccgggcaagtcagagcatttctgagtatttatattggtaccagcagaaaccagggaaagcccctaagctcctgatctatcatgcatccactttgcaaagtggggtcccatcacgtttcagtggcagtggatctgggacagatttcactctcaccatcagcagtctgcaacctgaagattttgctacgtactactgtcgacagtatctgcggcctcctttgacgttcggccaagggaccaaggtggaaatcaaacgg

SEQ ID NO: 366 - DNA, 324 bp, Homo sapiens
gacatccagatgacccagtctccatcctccctgtctgcatccgtaggagaccgtgtcaccatcacttgccgggcaagtcagtggattggggtgagtttaaattggtatcagcagaaaccagggaaagcccctaagctcctgatctatcagagttccctgttgcaaagtggggtcccatcacgtttcagtggcagtggatctgggacagatttcactctcaccatcagcagtctgcaacctgaagattttgctacgtactactgtcaacaggtgtatatttttccttttacgttcggccaagggaccaaggtggaaatcaaacgg

SEQ ID NO: 367 - DNA, 324 bp, Homo sapiens
gacatccagatgacccagtctccatcctccctgtctgcatctgtaggagaccgtgtcaccatcacttgccgggcaagtcagcctattgagcgttggttatattggtaccagcagaaaccagggaaagcccctaagctcctgatctatggtgcgtccgagttgcaaagtggggtcccatcacgtttcagtggcagaggatctgggacagatttcactctcaccatcagcagtctgcaacctgaagattttgctacgtactactgtcaacagtatcatgcgtatccttttacgttcggccaagggaccaaggtggaaatcaaacgg

SEQ ID NO: 368 - DNA, 324 bp, Homo sapiens
gacatccagatgacccagtctccatcctccctgtctgcatctgtaggagaccgtgtcaccatcacttgccgggcaagtcagaatattgagtggtatttaaattggtaccagcagaaaccagggaaagcccctaagctcctgatctatggttcgtccttgttgcaaagtggggtcccatcacgttttagtggcagtggatctgggacagatttcactctcaccatcagcagtctgcaacctgaagattttgctacgtactactgtcaacaggattggtcttctccttttacgttcggccaagggaccaaggtggaaatcaaacgg

SEQ ID NO: 369 - DNA, 324 bp, Homo sapiens
gacatccagatgacccagtctccatcctttctgtctgcatctgtaggagaccgtgtcaccatcacttgccgggcaagtcaggttattgggattacgttaaattggtatcagcagaaaccagggaaagcccctaagctcctgatctatcagggatccttgttgcaaagtggggtcccatcacgtttcagtggcagtggatctgggacagatttcactctcaccatcaacagtctgcaacctgaagattttgctacgtactactgtcaacagtcgtggcagacgccttttacgttcggccaagggaccaaggtggaaatcaaacgg

SEQ ID NO: 370 - DNA, 324 bp, Homo sapiens
gacatccagatgacccagtctccatcctccctgtctgcatctgtaggagaccgtgtcaccatcacttgccgggcaagtcaggagattcgtgctgcgttacagtggtaccagcagaaaccagggaaagcccctaagctcctgatctatcaggtttccattttgcaaagtggggtcccatcacgtttcagtggcagtggatctgggacagatttcactctcaccatcagcagtctgcaacctgaagattttgctacgtactactgtcaacagtctgataggtatccttttacgttcggccaagggaccaaggtggaaatcaaacgg

SEQ ID NO: 371 - DNA, 324 bp, Homo sapiens
gacatccagatgacccagtctccatcctccctgtctgcatctgtaggagaccgtgtcaccatcacttgccgggcaagtcagtatattgcggagtttttatattggtaccagcagaaaccagggaaagcccctaagctcctgatctataaggcttccattttgcaaagtggggtcccatcacgtttcagtggcagtggatctgggacagatttcactctcaccatcagcagtctgcaacctgaagatttcgctacgtactactgtcaacagtataatgcttatccttttacgttcggccaagggaccaaggtggaaatcaaacgg

SEQ ID NO: 372 - DNA, 357 bp, Homo sapiens
gaggtgcagctgttggagtctgggggaggcttggtacagcctggggggtccctgcgtctctcctgtgcagcctccggattcaccttttctgagtatcggatggcttgggtccgccaggctccagggaagggtctggagtgggtctcatctattgagggtgatggtcatattacatactacgcagactccgtgaagggccggttcaccatctcccgcgacaattccaagaacacgctgtatctgcaaatgaacagcctgcgtgccgaggataccgcggtatattactgtgcgaaatcggatatttcgtatgatcagtttgactactggggtcagggaaccctggtcaccgtctcgagc

SEQ ID NO: 373 - DNA, 357 bp, Homo sapiens
gaggtgcagctgttggagtctgggggaggcttggtacagcctggggggtccctgcgtctctcctgtgcagcctccggattcacctttgagatgtataagatggcgtgggtccgccaggctccagggaagggtctagagtgggtctcaactatttcgagtcgtggtggtacgacttactacgcagactccgtgaagggccggttcaccatctcccgcgacaattccaagaacacgctgtatctgcaaatgaacagcctgcgtgccgaggacaccgcggtatattactgtgcgaaatttcgtggtagtggggagtcgtttgactactggggtcagggaaccctggtcaccgtctcgagc

SEQ ID NO: 374 - DNA, 354 bp, Homo sapiens
gaggtgcagctgttggagtctgggggaggcttggtacagcctggggggtccctgcgtctctcctgtgcagcctccggattcacctttgggcgttatacgatgaattgggtccgccaggctccagggaagggtctagagtgggtctcatctattggtgcgcagggtcaggatacatactacgcagactccgtgaagggccggttcaccatctcccgcgacaattccaagaacacgctgtatctgcaaatgaacagcctgcgtgccgaggataccgcggtatattactgtgcgaaatataatagtaagcatgcgtttgactactggggtcagggaaccctggtcaccgtctcgagc

SEQ ID NO: 375 - DNA, 357 bp, Homo sapiens
gaggtgcagctgttggagtctgggggaggcttggtacagcctggggggtccctgcgtctctcctgtgcagcctccggattcacctttctgtcgtatcagatggcttgggtccgccaggctccagggaagggtctagagtgggtctcaacgattagtgggaatggtagtcgtacatactacgcagactccgtgaagggccggttcaccatctcccgcgacaattccaagaacacgctgtatctgcaaatgaacagcctgcgtgccgaggataccgcggtatattactgtgcgaaaagtgggccgaatggggggatgtttgactactggggccagggaaccctggtcaccgtctcgagc

SEQ ID NO: 376 - DNA, 324 bp, Homo sapiens
gacatccagatgacccagtctccatcctccctgtctgcatctgtaggagaccgtgtcaccatcacttgccgggcaagtcagagcattaatcaggtgttaaattggtaccagcagaaaccagggaaagcccctaagctcctgatctatcaggcatcccttttgcaaagtggggtcccatcacgtttcagtggcagtggatctgggacagatttcactctcaccatcagcagtctgcaacctgaagattttgctacgtactactgtcaacagttttggggttttccttttacgttcggccaagggaccaaggtggaaatcaaacgg

SEQ ID NO: 377 - DNA, 324 bp, Homo sapiens
gacatccagatgacccagtctccatcctccctgtctgcatctgtaggagaccgtgtcaccatcacttgccgggcaagtcagagcattgagcattggttatattggtaccagcagaaaccagggaaagcccctaagctcctgatctatcatgcatcccagttgcaaagtggggtcccatcacgtttcagtggcagtggatctgggacagatttcactctcaccatcagcagtctgcaacctgaagattttgctacgtactactgtcaacagtatcatttgccgcctatgacgttcggccaagggaccaaggtggaaatcaaacgg

SEQ ID NO: 378 - DNA, 324 bp, Homo sapiens
gacatccagatgacccagtctccatcctccctgtctgcatctgtaggagaccgtgtcaccatcacttgccgggcaagtcagagcattaaggtttatttacggtggtaccagcagaaaccagggaaagcccctaagctcctgatctataaggcatcccttttgcaaagtggggtcccatcacgtttcagtggcagtggatctgggacagatttcactctcaccatcagcagtctgcaacctgaagattttgctacgtactactgtcaacaggattttgatcatccttcgacgttcggccaagggaccaaggtggaaatcaaacgg

SEQ ID NO: 379 - DNA, 324 bp, Homo sapiens
gacatccagatgacccagtctccatcctccctgtctgcatctgtaggagaccgtgtcaccatcacttgccgggcaagtcagagcattgagttttttttatattggtaccagcagaaaccagggaaaacccctaagctcctgatctatcatgcatcctggttgcaaagtggggtcccatcacgtttcagtggcagtggatctgggacagatttcactctcaccatcagcagtctgcaacctgaagattttgctacgtactactgtcaacagtattttagttatcctttgacgttcggccaagggaccaaggtggaaatcaaacgg

SEQ ID NO: 380 - DNA, 324 bp, Homo sapiens
gacatccagatgacccagtctccatcctccctgtctgcatctgtagaggaccgtgtcaccatcacttgccgggcaagtcagagcatttattattttttacattggtaccagcagaaaccagggaaagcccctaagctcctgatctatcgggcatcctctttgcaaagtggggtcccatcacgtttcagtggcagtggatctgggacagatttcactctcaccatcagcagtctgcaacctgaagattttgctacgtactactgtcaacaggtgtggcgtcctcctcttacgttcggccaagggaccaaggtggaaatcaaacgg

SEQ ID NO: 381 - DNA, 324 bp, Homo sapiens
gacatccagatgacccagtctccatcctccctgtctgcatctgtaggagaccgtgtcaccatcacttgccgggcaagtcagagcattactgttgagttaaggtggtaccagcagaaaccagggaaagcccctaagctcctgatctatcatgcatcccgtttgcaaagtggggtcccatcacgtttcagtggcagtggatctgggacagatttcactctcaccatcagcagtctgcaacctgaagattttgctacgtactactgtcaacagtatgctacttggcctctgacgttcggccaagggaccaaggtggaaatcaaacgg

SEQ ID NO: 382 - DNA, 324 bp, Homo sapiens
gacatccagatgacccagtctccatcctccctgtctgcatctgtaggagaccgtgtcaccatcacttgccgggcaagtcagagcatttatctgagtttattgtggtaccagcagaaaccagggaaaacccctaagctcctgatctataatgcatcccggttgcaaagtggggtcccatcacgtttcagtggcagtggatctgggacagatttcactctcaccatcagcagtctgcaacctgaagattttgctacgtactactgtcaacagtcgtgggagtggccttttacgttcggccaagggaccaaggtggaaatcaaacgg

SEQ ID NO: 383 - DNA, 324 bp, Homo sapiens; identical to SEQ ID NO: 377

SEQ ID NO: 384 - DNA, 324 bp, Homo sapiens
gacatccagatgacccagtctccatcctccctgtctgcatctgtaggagaccgtgtcaccatcacttgccgggcaagtcagagcattagcagctatttaaattggtaccagcagaaaccagggaaagcccctaagctcctgatctatggtgcatccattttgcaaagtggggtcccatcacgtttcagtggcagtggatctgggacagatttcactctcaccatcagcagtctgcaacctgaagattttgctacgtactactgtcaacagtgggtttggttgcctattacgttcggccaagggaccaaggtggaaatcaaacgg

SEQ ID NO: 385 - DNA, 324 bp, Homo sapiens
gacatccagatgacccagtctccatcctccctgtctgcatctgtaggagaccgtgtcaccatcacttgccgggcaagtcagagcattcagcagtggttatattggtaccagcagaaaccagggaaagcccctaagctcctgatctataaggcatccattttgcaaagtggggtcccatcacgtttcagtggcagtggatctgggacagatttcactctcaccatcagcagtctgcaacctgaagattttgctacgtactactgtcaacagtatgagcggtatccttttacgttcggccaagggaccaaggtggaaatcaaacgg

SEQ ID NO: 386 - DNA, 324 bp, Homo sapiens
gacatccagatgacccagtctccatcctccctgtctgcatctgtaggagaccgtgtcaccatcacttgccgggcaagtcagagcattactcatgcgttaaagtggtaccagcagaaaccagggaaagcccctaagctcctgatctataaggcatcctttttgcaaagtggggtcccatcacgtttcagtggcagtggatctgggacagatttcactctcaccatcagcagtctgcaacctgaagattttgctacgtactactgtcaacagtctcagcttcttcctatgacgttcggccaagggaccaaggtggaaatcaaacgg

SEQ ID NO: 387 - DNA, 324 bp, Homo sapiens
gacatccagatgacccagtctccatcctccctgtctgcatctgtaggagaccgtgtcaccatcacttgccgggcaagtcagagcatttataattatttaacttggtaccagcagaaaccagggaaagcccctaagctcctgatctatggtgcatccatgttgcaaagtggggtcccatcacgtttcagtggcagtggatctgggacagatttcactctcaccatcagcagtctgcaacctgaagattttgctacgtactactgtcaacaggagaggtctggtccttatacgttcggccaagggaccaaggtggaaatcaaacgg

SEQ ID NO: 388 - DNA, 324 bp, Homo sapiens
gacatccagatgacccagtctccatcctccctgtctgcatctgtaggagaccgtgtcaccatcacttgccgggcaagtcagagcattagcagctatttaaattggtaccagcagaaaccagggaaagcccctaagctcctgatctattttgcatcccgtttgcaaagtggggtcccatcacgtttcagtggcagtggatctgggacagatttcactctcaccatcagcagtctgcaacctgaagattttgctacgtactactgtcaacagaatatgctgttgcctgtgacgttcggccaagggaccaaggtggaaatcaaacgg

SEQ ID NO: 389 - DNA, 324 bp, Homo sapiens
gacatccagatgacccagtctccatcctccctgtctgcatctgtaggagaccgtgtcaccatcacttgccgggcaagtcagagcattaggcattttttatattggtaccagcagaaaccagggaaagcccctaagctcctgatctatcatgcatccgtgttgcaaagtggggtcccatcacgtttcagtggcagtggatctgggacagatttcactctcaccatcagcagtctgcaacctgaagattttgctacgtactactgtcaacagtatggggatttgccttttacgttcggtcaagggaccaaggtggaaatcaaacgg

SEQ ID NO: 390 - DNA, 324 bp, Homo sapiens
gacatccagatgacccagtctccaccctccctgtctgcatctgtaggagaccgtgtcaccatcacttgccgggcaagtcagagcattgggtggtggttatattggtaccagcagaaaccagggaaagcccctaagctcctgatctatcatgcatccaggttgcaaagtggggtcccatcacgtttcagtggcagtggatctgggacagatttcactctcaccatcagcagtctgcaacctgaagattttgctacgtactactgtcaacagtataattctacgccttttacgttcggccaagggaccaaggtggaaatcaaacgg

SEQ ID NO: 391 - DNA, 324 bp, Homo sapiens
gacatccagatgacccagtctccatcctccctgtctgcatctgtaggagaccgtgtcaccatcacttgccgggcaagtcagagcattgataggtttttagcttggtaccagcagaaaccagggaaagcccctaagctcctgatctatcatgcatccgatttgcaaagtggggtcccatcacgtttcagtggcagtggatctgggacagatttcactctcaccatcagcagtctgcaacctgaagattttgctacgtactactgtcaacagtttgatcagtggccttttacgttcggccaagggaccaaggtggaaatcaaacgg

SEQ ID NO: 392 - DNA, 324 bp, Homo sapiens
gacatccagatgacccagtctccatcctccctgtctgcatctgtaggagaccgtgtcaccatcacttgccgggcaagtcagagcattaagagtaggttagcgtggtaccagcagaaaccagggaaagcccctaagctcctgatctataaggcatcccttttgcaaagtggggtcccatcacgtttcagtggcagtggatctgggacagatttcactctcaccatcagcagtctgcaacctgaagattttgctacgtactactgtcaacagtatagtaggaatcctattacgttcggccaagggaccaaggtggaaatcaaacgg

SEQ ID NO: 393 - DNA, 324 bp, Homo sapiens
gacatccagatgacccagtctccatcctccctgtctgcatctgtaggagaccgtgtcaccatcacttgccgggcaagtcagagcattagtcggtctttacattggtaccagcagaaaccagggaaagcccctaagctcctgatctatcgggcatcccgtttgcaaagtggggtcccatcacgtttcagtggcagtggatctgggacagatttcactctcaccatcagcagtctgcaacctgaagattttgctacgtactactgtcaacagaatcggcttaggcctcatacgttcggccaagggaccaaggtggaaatcaaacgg

SEQ ID NO: 394 - DNA, 324 bp, Homo sapiens
gacatccagatgacccagtctccatcctccctgtctgcatctgtaggagaccgtgtcaccatcacttgccgggcaagtcagagcattaagcagtttttatattggtaccagcagaaaccagggaaagcccctaagctcctgatctatcaggcatcctatttgcaaagtggggtcccatcacgtttcagtggcagtggatctgggacagatttcactctcaccatcagcagtctgcaacctgaagattttgctacgtactactgtcaacagtatgaggtttatccttttacgttcggccaagggaccaaggtggaaatcaaacgg

SEQ ID NO: 395 - DNA, 324 bp, Homo sapiens
gacatccagatgacccagtctccatcctccctgtctgcatctgtaggagaccgtgtcaccatcacttgccgggcaagtcagagcatttatcattatttatattggtaccagcagaaaccagggaaagcccctaagctcctgatctatgctgcatcccttttgcaaagtggggtcccatcacgtttcagtggcagtggatctgggacagatttcactctcaccatcagcagtctgcaacctgaagattttgctacgtactactgtcaacagtatcagctttatccttttacgttcggccaagggaccaaggtggaaatcaaacgg

SEQ ID NO: 396 - DNA, 324 bp, Homo sapiens
gacatccagatgacccagtctccatcctccctgtctgcatctgtaggagaccgtgtcaccatcacttgccgggcaagtcagagcattagcagctatttaaattggtaccagcagaaaccagggaaagcccctaagctcctgatctattttgcatcctctttgcaaagtggggtcccatcacgtttcagtggcagtggatctgggacagatttcactctcaccatcagcagtctgcaacctgaagattttgctacgtactactgtcaacagggttgggatgtgccttatacgttcggccaagggaccaaggtggaaatcaaacgg

SEQ ID NO: 397 - DNA, 324 bp, Homo sapiens
gacatccagatgacccagtctccatcctccctgtctgcatctgtaggagaccgtgtcaccatcacttgccgggcaagtcagagcattgataattggttacggtggtaccagcagaaaccagggaaagcccctaagctcctgatctatagtgcatcctttttgcaaagtggggtcccatcacgtttcagtggcagtggatctgggacagatttcactctcaccatcagcagtctgcaacctgaagattttgctacgtactactgtcaacaggggcgttcggcgcctcagacgttcggccaagggaccaaggtggaaatcaaacgg

SEQ ID NO: 398 - DNA, 324 bp, Homo sapiens
gacatccagatgacccagtctccatcctccctgtctgcatctgtaggagaccgtgtcaccatcacttgccgggcaagtcagagcatttggtattggttaagttggtaccagcagaaaccagggaaagcccctaagctcctgatctattatgcatccagtttgcaaagtggggtcccatcacgtttcagtggcagtggatctgggacagatttcactctcaccatcagcagtctgcaacctgaagattttgctacgtactactgtcagcagatgtcgagtactccttttacgttcggccaagggaccaaggtggaaatcaaacgg

SEQ ID NO: 399 - DNA, 324 bp, Homo sapiens
gacatccagatgacccagtctccatcctccctgtctgcatctgtaggagaccgtgtcaccatcacttgccgggcaagtcagagcattacgatgaggttagggtggtaccagcagaaaccagggaaagcccctaagctcctgatctataatgcatcccatttgcaaagtggggtcccatcacgtttcagtggcagtggatctgggacagatttcactctcaccatcagcagtctgcaacctgaagattttgctacgtactactgtcaacagtattttgattatcctacgacgttcggccaagggaccaaggtggaaatcaaacgg

SEQ ID NO: 400 - DNA, 324 bp, Homo sapiens
gacatccagatgacccagtctccatcctccctgtctgcatctgtaggagaccgtgtcaccatcacttgccgggcaagtcagagcattcattggctgttatcgtggtaccagcagaaaccagggaaagcccctaagctcctgatctatgctgcatccagtttgcaaagtggggtcccatcacgtttcagtggcagtggatctgggacagatttcactctcaccatcagcagtctgcaacctgaagattttgctacgtactactgtcaacagaatttggctaggccttttacgttcggccaagggaccaaggtggaaatcaaacgg

SEQ ID NO: 401 - DNA, 348 bp, Homo sapiens
gaggtgcagctgttggagtctgggggaggcttggtacagcctggggggtccctgcgtctctcctgtgcagcctccggattcacctttagcagctatgccatgagctgggtccgccaggttccagggaagggtctagagtgggtctcatctatttcttttcatggtacgcctacagggtacgcagactccgtgaagggccggttcaccatctcccgcgacaattccaagaacacgctgtatctgcaaatgaacagcctgcgtgccgaggacaccgcggtatattactgtgcgaaagggatgttttattttgactactggggccagggaaccctggtcaccgtctcgagc

SEQ ID NO: 402 - DNA, 348 bp, Homo sapiens
gaggtgcagctgttggagtctgggggaggcttggtacagcctggggggtccctgcgtctctcctgtgcagcctccggattcacctttaatgggtatgatatgttttgggtccgccaggctccagggaagggtctagagtgggtctcatctatttcggattcgggttctgtgacacggtacgcagactccgtgaagggccggttcaccatctcccgcgacaattccaagaacacgctgtatctgcaaatgaacagcctgcgtgccgaggacaccgcggtatattactgtgcgaaatcttgggatgagtttgactactggggccagggaaccctggtcaccgtctcgagc

SEQ ID NO: 403 - DNA, 348 bp, Homo sapiens
gaggtgcagctgttggagtctgggggaggcttggtacagcctggggggtccctgcgtctctcctgtgcagcctccggattcacctttggttcgtataagatgggttgggtccgccaggctccagggaagggtctagagtgggtctcatcgattactaaggatggttctaagacagcttacgcagactccgtgaagggccggttcaccatctcccgcgacaattccaagaacacgctgtatctgcaaatgaacagcctgcgtgccgaggacaccgcggtatattactgtgcgaaatttcggccgaagtttgaatactggggccagggaaccctggtcaccgtctcgagc

SEQ ID NO: 404 - DNA, 348 bp, Homo sapiens
gaggtgcagctgttggagtctgggggaggcttggtacagcctggggggtccctgcgtctctcctgtgcagcctccggattcacctttagcagctatgccatgagctgggtccgccaggctccagggaagggtctagagtgggtctcagctattagtggtagtggtggtagcacatactacgcagactccgtgaagggccggttcaccatctcccgcgacaattccaagaacacgctgtatctgcaaatgaacagcctgcgtgccgaggacaccgcggtatattactgtgcgaaagggcgttttagttttgactactggggccagggaaccctggtcaccgtctcgagc

SEQ ID NO: 405 - DNA, 348 bp, Homo sapiens
gaggtgcagctgttggagtctgggggaggcttggtacagcctggggggtccctgcgtctctcctgtgcagcctccggattcacctttaggaattatgatatgaattgggtccgccaggctccagggaagggtctagagtgggtctcagctattagtggtagtggtggtagcacatactacgcagactccgtgaagggccggttcaccatctcccgcgacaattccaagaacacgctgtatctgcaaatgaacagcctgcgtgccgaggacaccgcggtatattactgtgcgaaaggtttgcatacgtttgactactggggccagggaaccctggtcaccgtctcgagc

SEQ ID NO: 406 - DNA, 348 bp, Homo sapiens
gaggtgcagctgttggagtctgggggaggcttggtacagcctggggggtccctgcgtctctcctgtgcagcctccggattcacctttgggttgtattggatgagttgggtccgccaggctccagggaagggtctagagtgggtctcaacgattgatcagctgggtgtttctacattttacgcagactccgtgaagggccggttcaccatctcccgcgacaattccaagaacacgctgtatctgcaaatgaacagcctgcgtgccgaggacaccgcggtatattactgtgcgaaagggtatgtttattttgactactggggccagggaaccctggtcaccgtctcgagc

SEQ ID NO: 407 - DNA, 348 bp, Homo sapiens
gaggtgcagctgttggagtctgggggaggcttggtacagcctggggggtccctgcgtctctcctgtgcagcctccggattcacctttcctctgtatgcgatgacttgggtccgccaggctccagggaagggtctagagtgggtctcagctattagtggtagtggtggtagcacatactacgcagactccgtgaagggccggttcaccatctcccgcgacaattccaagaacacgctgtatctgcaaatgaacagcctgcgtgccgaggacaccgcggtatattactgtgcgaaagggtcgaggtattttgactactggggccagggaaccctggtcaccgtctcgagc

SEQ ID NO: 408 - DNA, 348 bp, Homo sapiens
gaggtgcagctgttggagtctgggggaggcttggtacagcctggggggtccctgcgtctctcctgtgcagcctccggattcaccttttataagtatttgatgtggtgggtccgccaggctccagggaagggtctagagtgggtctcagctattagtggtagtggtggtagcacatactacgcggactccgtgaagggccggttcaccatctcccgcgacaattccaagaacacgctgtatctgcaaatgaacagcctgcgtgccgaggacaccgcggtatattactgtgcgaaagagggtttggggtttgactactggggccagggaaccctggtcaccgtctcgagc

SEQ ID NO: 409 - DNA, 360 bp, Homo sapiens
gaggtgcagctgttggagtctgggggaggcttggtacagcctggggggtccctgcgtctctcctgtgcagcctccggattcacctttcgtaagtataagatgggttgggtccgccaggctccagggaagggtctagagtgggtctcagctattagtggtagtggtggtagcacatactacgcagactccgtgaagggccggttcaccatctcccgcgacaattccaagaacacgctgtatctgcaaatgaacagcctgcgtgccgaggacaccgcggtatattactgtgcgaaatatcatttgcagtggggtcataattttgactactggggccagggaaccctggtcaccgtctcgagc

SEQ ID NO: 410 - DNA, 360 bp, Homo sapiens
gaggtgcagctgttggagtctgggggaggcttggtacagcctggggggtccctgcgtctctcctgtgcagcctccggattcacctttagcagctatgccatgagctgggtccgccaggctccagggaagggtctagagtgggtctcagctattagtggtagtggtggtagcacatactacgcagactccgtgaagggccggttcaccatctcccgcgacaattccaagaacacgctgtatctgcaaatgaacagcctgcgtgccgaggacaccgcggtatattactgtgcgaaatatcagacgcgggtgggtgatggttttgactactggggccagggaaccctggtcaccgtctcgagc

SEQ ID NO: 411 - DNA, 360 bp, Homo sapiens
gaggtgcagctgttggagtctgggggaggcttggtacagcctggggggtccctgcgtctctcctgtgcagcctccggattcacctttagcagctatgccatgagctgggtccgccaggctccagggaagggtctagagtgggtctcagctattagtggtagtggtggtagcacatactacgcagactccgtgaagggccggttcaccatctcccgcgacaattccaagaacacgctgtatctgcaaatgaacagcctgcgtgccgaggacaccgcggtatattactgtgcgaaagcgatgtctatggcgggttcggcttttgactactggggccagggaaccctggtcaccgtctcgagc

SEQ ID NO: 412 - DNA, 360 bp, Homo sapiens
gaggtgcagctgttggagtctgggggaggcttggtacagcctggggggtccctgcgtctctcctgtgcagcctccggattcacctttagcagctatgccatgagctgggtccgccaggctccagggaagggtctagagtgggtctcagctattagtggtagtggtggtagcacatactacgcagactccgtgaagggccggttcaccatctcccgcgacaattccaagaacacgctgtatctgcaaatgaacagcctgcgtgccgaggacaccgcggtatattactgtgcgacacagcctagggcgctggctggttattttgactactggggccaggggaccctggtcaccgtctcgagc

SEQ ID NO: 413 - DNA, 360 bp, Homo sapiens
gaggtgcagctgttggagtctgggggaggcttggtacagcctggggggtccctgcgtctctcctgtgcagcctccggattcacctttagcagctatgccatgagctgggtccgccaggctccagggaagggtctagagtgggtctcagctattagtggtagtggtggtagcacatactacgcagactccgtgaagggccggttcaccatctcccgcgacaattccaagaacacgctgtatctgcaaatgaacagcctgcgtgccgaggacaccgcggtatattactgtgcgaaaacgctttcgggttctgatatggcgtttgactactggggccagggaaccctggtcaccgtctcgagc

SEQ ID NO: 414 - DNA, 360 bp, Homo sapiens
gaggtgcagctgttggagtctgggggaggcttggtacagcctggggggtccctgcgtctctcctgtgcagcctccggattcacctttagcagctatgccatgagctgggtccgccaggctccagggaagggtctagagtgggtctcagctattagtggtagtggtggtagcacatactacgcagactccgtgaagggccggttcaccatctcccgcgacaattccaagaacacgctgtatctgcaaatgaacagcctgcgtgccgaggacaccgcggtatattactgtgcgaaaggtatgactgttgggcattttcagtttgactactggggccagggaaccctggtcaccgtctcgagc

SEQ ID NO: 415 - DNA, 360 bp, Homo sapiens
gaggtgcagctgttggagtctgggggaggcttggtacagcctggggggtccctgcgtctctcctgtgcagcctccggattcacctttagcagctatgccatgagctgggtccgccaggctccagggaagggtctagagtgggtctcagctattagtggtagtggtggtagcacatactacgcagactccgtgaagggccggttcaccatctcccgcgacaattccaagaacacgctgtatctgcaaatgaacagcctgcgtgccgaggacaccgcggtatattactgtgcgaaagcgtttgcgcatgtgatggggggttttgactactggggccagggaaccctggtcaccgtctcgagc

SEQ ID NO: 416 - DNA, 360 bp, Homo sapiens
gaggtgcagctgttggagtctgggggaggcttggtacagcctggggggtccctgcgtctctcctgtgcagcctccggattcacctttagcagctatgccatgagctgggtccgccaggctccagggaagggtctagagtgggtctcagctattagtggtagtggtggtagcacatactacgcagactccgtgaagggccggttcaccatctcccgcgacaattccaagaacacgctgtatctgcaaatgaacagcctgcgtgccgaggacaccgcggtatattactgtgcgaaagctatgagtcataagtttcaggggtttgactactggggccagggaaccctggtcaccgtctcgagc

SEQ ID NO: 417 - DNA, 354 bp, Homo sapiens
gaggtgcagctgttggagtctgggggaggcttggtacagcctggggggtccctgcgtctctcctgtgcagcctccggattcacctttggtggttatgctatggcttgggtccgccaggctccagggaagggtctagagtgggtctcaaggatttcgccgtcgggtgggggtacatactacgcagactccgtgaagggccggttcaccatctcccgcgacaattccaagaacacgctgtatctgcaaatgaacagcctgcgtgccgaggacaccgcggtatattactgtgcgaaaatgattcaggggcttaggtttgactactggggtcagggaaccctggtcaccgtctcgagc

SEQ ID NO: 418 - DNA, 354 bp, Homo sapiens
gaggtgcagctgttggagtctgggggaggcttggtacagcctggggggtccctgcgtctctcctgtgcagcctccggattcacctttgcggcttattcgatgtcgtgggtccgccaggctccagggaagggtctagagtgggtctcaagtattgctcctgatggtactcatacatactacgcagactccgtgaagggccggttcaccatctcccgcgacaattccaagaacacgctgtatctgcaaatgaacagcctgcgtgccgaggacaccgcggtatattactgtgcgaaatggcttgagcttcctatttttgactactggggtcagggaaccctggtcaccgtctcgagc

SEQ ID NO: 419 - DNA, 363 bp, Homo sapiens
gaggtgcagctgttggagtctgggggaggcttggtacagcctggggggtccctgcgtctctcctgtgcagcctccggattcacctttccttattatcatatggcgtgggtccgccaggctccagggaagggtctagagtgggtctcatcgattacgccttcgggtggtcagacatactacgcagactccgtgaagggccggttcaccatctcccgcgacaattccaagaacacgctgtatctgcaaatgaacagcctgcgtgccgaggacaccgcggtatattactgtgcgaaaattcatcgtgcgggggctgctagtaattttgactactggggtcagggaaccctggtcaccgtctcgagc

SEQ ID NO: 420 - DNA, 372 bp, Homo sapiens
gaggtgcagctgttggagtctgggggaggcttggtacagcctggggggtccctgcgtctctcctgtgcagcctccggattcacctttggtgcgtatgagatgaattgggtccgccaggctccagggaagggtctagagtgggtctcaacgattgatagtaagggttttaagacatactacgcagactccgtgaagggccggttcaccatctcccgcgacaattccaagaacacgctgtatctgcaaatgaacagcctgcgtgccgaggacaccgcggtatattactgtgcgaaatcttcggtgacgtctcttttggcgtatagtaggcattttgactactggggtcagggaaccctggtcaccgtctcgagc

SEQ ID NO: 421 - DNA, 369 bp, Homo sapiens
gaggtgcagctgttggagtctgggggaggcttggtacagcctggggggtccctgcgtctctcctgtgcagcctccggattcaccttttcgaattatgatatggcttgggtccgccaggctccagggaagggtctagagtgggtctcaagtatttcggatatgggtagggctacatactacgcagactccgtgaagggccggttcaccatctcccgcgacaattccaagaacacgctgtatctgcaaatgaacagcctgcgtgccgaggacaccgcggtatattactgtgcgaaaacttttgctactaatgggatgctttctggggcttttgactactggggtcagggaaccctggtcaccgtctcgagc

SEQ ID NO: 422 - DNA, 369 bp, Homo sapiens
gaggtgcagctgttggagtctgggggaggcttggtacagcctggggggtccctgcgtctctcctgtgcaggctccggattcacctttcgggattatccgatgagttgggtccgccaggctccagggaagggtctagagtgggtctcaacgatttattcttggggttctaagacatactacgcagactccgtgaagggccggttcaccatctcccgcgacaattccaagaacacgctgtatctgcaaatgaacagcctgcgtgccgaggataccgcggtatattactgtgcgaaaatggcgcaggcggagacttcgcctaataattattttgactactggggtcagggaaccctggtcaccgtctcgagc

SEQ ID NO: 423 - DNA, 369 bp, Homo sapiens
gaggtgcagctgttggagtctgggggaggcttggtacagcctggggggtccctgcgtctctcctgtgcagcctccggattcacctttgatgattataagatgagttgggtccgccaggctccagggaagggtctagagtgggtctcatcgattaatggttctgggcagggtacatactacgcagactccgtgaagggccggttcaccatctcccgcgacaattccaagaacacgctgtatctgcaaatgaacagcctgcgtgccgaggacaccgcggtatattactgtgcgaaatctctggctttggcgtctactcggcatactggttttgactactggggtcagggaaccctggtcaccgtctcgagc

SEQ ID NO: 424 - DNA, 324 bp, Homo sapiens
gacatccagatgacccagtctccatcctccctgtctgcatctgtaggagaccgtgtcaccatcacttgccgggcaagtcagtctattggggagaggttatggtggtaccagcagaaaccagggaaagcccctaagctcctgatctataatagttccgtgttgcaaagtggggtcccatcacgtttcagtggcagtggatctgggacagatttcactctcaccatcagcagtctgcaacctgaagattttgctacgtactactgtcaacagagttggagggggcctgctacgttcggccaagggaccaaggtggaaatcaaacgg

SEQ ID NO: 425 - DNA, 324 bp, Homo sapiens
gacatccagatgacccagtctccatcctccctgtctgcatctgtaggagaccgtgtcaccatcacttgccgggcaagtcaggatattgatcgggctttacagtggtaccagcagaaaccagggaaagcccctaagctcctgatctatatgagttccgttttgcaaagtggggtcccatcacgtttcagtggcagtggatctgggacagatttcactctcaccatcagcagtctgcaacctgaagattttgctacgtactactgtcaacagcaggctgggtatccttttacgttcggccaagggaccaaggtggaaatcaaacgg

SEQ ID NO: 426 - DNA, 324 bp, Homo sapiens
gacatccagatgacccagtctccatcctccctgtctgcatctgtaggagaccgtgtcaccatcacttgccgggcaagtcagaatattgatcgtgagttacgttggtaccagcagaaaccagggaaagcccctatgctcctgatctatcatgcgtccaggttgcaaagtggggtcccatcacgtttcagtggcagtggatctgggacagatttcactctcactatcagcagtctgcaacctgaagattttgctacgtactactgtcaacagtattttacttggcctcttacgttcggccaagggaccaaggtggaaatcaaacgg

SEQ ID NO: 427 - DNA, 324 bp, Homo sapiens
gacatccagatgacccagtctccatcctccctgtctgcatctgtaggagaccgtgtcaccatcacttgccgggcaagtcagagtattagtacttcgttacagtggtaccagcagaaaccagggaaagcccctaagctcctgatctattctagttccacgttgcaaagtggggtcccatcacgtttcagtggcagtggatctgggacagatttcactctcaccatcagcagtctgcaacctgaagattttgctacgtactactgtcaacagcagtgggagtatccttttacgttcggccaagggaccaaggtggaaatcaaacgg

SEQ ID NO: 428 - DNA, 324 bp, Homo sapiens
gacatccagatgacccagtctccatcctccctgtctgcatctgtaggagaccgtgtcaccatcacttgccgggcaagtcagaatattggtacggcgttatcttggtatcagcagaaaccagggaaagcccctaagctcctgatctattgggcttccattttgcaaagtggggtcccatcacgtttcagtggcagtggatctgggacagatttcactctcaccatcagcagtctgcaacctgaagattttgctacgtactactgtcaacagactaattcttggccttttacgtttggccaagggaccaaggtggaaatcaaacgg

SEQ ID NO: 429 - DNA, 324 bp, Homo sapiens
gacatccagatgacccagtctccatcctccctgtctgcatctgtaggagaccgtgtcaccatcacttgccgggcaagtcagaagattgatgatgcgttacagtggtatcagcagaaaccagggaaagcccctaagctcctgatctatttggcgtcccatttgcaaagtggggtcccatcacgtttcagtggcagtggatctgggacagatttcactctcaccatcagcagtttgcaacctgaagattttgctacgtactactgtcaacagcagagtaattggccttttacgttcggccaagggaccaaggtggaaatcaaacgg

SEQ ID NO: 430 - DNA, 324 bp, Homo sapiens
gacatccggatgacccagtctccatcctccctgtctgcatctgtaggagaccgtgtcaccatcacttgccgggcaagtcagagtattgggcgggcgttacagtggtatcagcagaaaccagggaaagcccctaagctcctgatctatcagcgttccatgttgcaaagtggggtcccatcacgtttcagtggcagtggatctgggacagatttcactctcaccatcagcagtctgcaacctgaagattttgctacgtactactgtcaacagagttatctgtggccttttacgttcggccaagggaccaaggtggaaatcaaacgg

SEQ ID NO: 431 - DNA, 324 bp, Homo sapiens
gacatccagatgacccagtctccatcctccctgtctgcatctgtaggagaccgtgtcaccatcacttgccgggcaagtcaggagattgggaaggagttattgtggtatcagcagaaaccagggaaagcccctaagctcctgatctatgatgtttccgttttgcaaagtggggtcccatcacgtttcagtggcagtggatctgggacagatttcactctcaccatcagcagtctgcaacctgaagattttgctacgtactactgtcaacagtatcagtcttatcctaatacgttcggccaagggaccaaggtggaaatcaaacgg

SEQ ID NO: 432 - DNA, 324 bp, Homo sapiens
gacatccagatgacccagtctccatcctccctgtctgcatctgtaggagaccgtgtcaccatcacttgccgggcaagtcagcagattatgaggagtttaaattggtatcagcagaaaccagggaaagcccctaagctcctgatctatcagagttccattttgcaaagtggggtcccatcacgtttcagtggcagtggatctgggacagatttcactctcaccatcagcagtctgcaacctgaagattttgctacgtactactgtcaacaggcgtggcagtatccttttacgttcggccaagggaccaaggtggaaatcaaacgg

SEQ ID NO: 433 - DNA, 324 bp, Homo sapiens
gacatccagatgacccagtctccatcctccctgtctgcatctgtaggagaccgtgtcaccatcacttgccgggcaagtcaggatattcagcggcgtttagcttggtatcagcagaaaccagggaaagcccctaagctcctgatctataatgtgtcctatttgcaaagtggggtcccatcacgtttcagtggcagtggatctgggacagatttcactctcaccatcagcagtctgcaacctgaagattttgctacgtactactgtcaacagtataatgattatcctacgacgttcggccaagggaccaaggtggaaatcaaacgg

SEQ ID NO: 434 - DNA, 348 bp, Homo sapiens
gaggtgcagctgttggagtctgggggaggcttggtacagcctggggggtccctgcgtctctcctgtgcagcctccggattcacctttaggatgtatcagatgtattgggtccgccaggctccagggaagggtctagagtgggtctcaagtattagtgcgtctggtgcgggtacatactacgcagactccgtgaagggccggttcaccatctcccgcgacaattccaagaacacgctgtatctgcaaatgaacagcctgcgtgccgaggacaccgcggtatattactgtgcgaaagctgctagtagttttgactactggggtcagggaaccctggtcaccgtctcgagc

SEQ ID NO: 435 - DNA, 351 bp, Homo sapiens
gaggtgcagctgttggagtctgggggaggcttggtacagcctggggggtccctgcgtctctcctgtgcagcctccggattcaccttcgctagttatcagatgtattgggtccgccaggctccagggaagggtctagagtgggtctcaactattagtccttctggtggggggacatactacgcagactccgtgaagggccggttcaccatctcccgcgacaattccaagaacacgctgtatctgcaaatgaacagcctgcgtgccgaggacaccgcggtatattactgtgcgaaaaaggatactggtacgtttgactactggggtcagggaaccctggtcaccgtctcgagc

SEQ ID NO: 436 - DNA, 348 bp, Homo sapiens
gaggtgcagctgttggagtctgggggaggtttggtacagcctggggggtccctgcgtctctcctgtgcagcctccggattcacctttaataagtattctatggggtgggtccgccaggctccagggaagggtctagagtgggtctcacgtatttcttcttcgggtggtggtacatactacgcagactccgtgaagggccggttcaccatctcccgcgacaattccaagaacacgctgtatctgcaaatgaacagcctgcgtgccgaggacaccgcggtatattactgtgcgaaagttgctaatccgtttgactactggggtcagggaaccctggtcaccgtctcgagc

SEQ ID NO: 437 - DNA, 372 bp, Homo sapiens
gaggtgcagctgttggagtctgggggaggcttggtacagcctggggggtccctgcgtctctcctgtgcagcctccggattcacctttaataagtattctatggggtgggtccgccaggctccagggaagggtctagagtgggtctcacgtatttcttcttcgggtggtggtacatactacgcagactccgtgaagggccggttcaccatctcccgcgacaattccaagaacacgctgtatctgcaaatgaacagcctgcgtgccgaggacaccgcggtatattactgtgcgaaagagcctgataggtctgggtatcttactagggtggcgtttgactactggggtcagggaaccctggtcaccgtctcgagc

SEQ ID NO: 438 - DNA, 369 bp, Homo sapiens
gaggtgcagctgttggagtctgggggaggcttggtacagcctggggggtccctgcgtctctcctgtgcagcctccggattcacctttgagacttatcagatgtggtgggtccgccaggctccagggaagggtctagagtgggtctcaagtatttctccgagtggttctggtacatactacgcagactccgtgaagggccggttcaccatctcccgcgacaattccaagaacacgctgtatctgcaaatgaacagcctgcgtgccgaggacaccgcggtttattactgtgcgaaaatgtgtcctcgttgtagggatgtggttagtctttttgactactggggtcagggaaccctggtcaccgtctcgagc

SEQ ID NO: 439 - DNA, 363 bp, Homo sapiens
gaggtgcagctgttggagtctgggggaggcttggtacagcctggggggtccctgcgtctctcctgtgcagcctccggattcaccttttcggagtatggtatgtggtgggtccgccaggctccagggaagggtctagagtgggtctcaggtattactgctactggtaagatgacatactacgcagactccgtgaagggccggttcaccatctcccgcgacaattccaagaacacgctgtatctgcaaatgaacagcctgcgtgccgaggacaccgcggtatattactgtgcgaaatcgagtcttccttcgggtcagggtcattttgactactggggtcagggaaccctggtcaccgtctcgagc

SEQ ID NO: 440 - DNA, 366 bp, Homo sapiens
gaggtgcagctgttggagtctgggggaggcttggtacagcctggggggtccctgcgtctctcctgtgcagcctccggattcacctttcgtgagtatcagatgtcttgggcccgccaggctccagggaagggtctagagtgggtctcaacgattagtgcttcgggtagtgggacatactacgcagactccgtgaagggccggttcaccatctcccgcgacaattccaagaacacgctgtatctgcaaatgaacagcctgcgtgccgaggataccgcggtatattactgtgcgaaacggtttaagatttctccggtttttagtagttttgactactggggtcagggaaccctggtcaccgtctcgagc

SEQ ID NO: 441 - DNA, 366 bp, Homo sapiens
gaggtgcagctgttggagtctgggggaggcttggtacagcctggggggtccctgcgtctctcctgtgcagcctccggattcacctttgcggagtatcagatgtattgggtccgccaggctccagggaagggtctagagtgggtctcatctatttctgtgtctggtgctggtacatactacgcagactccgtgaagggccggttcaccatctcccgcgacaattccaagaacacgctgtatctgcaaatgaacagcctgcgtgccgaggacaccgcggtatattactgtgcgaaatcgcggaatacgctgacggattcgcatcgttttgactactggggtcagggaaccctggtcaccgtctcgagc

SEQ ID NO: 442 - DNA, 372 bp, Homo sapiens
gaggtgcagctgttggagtctgggggaggcttggtacagcctggggggtccctgcgtctctcctgtgcagcctccggattcacctttacgaggtatcagatggcgtgggtccgccaggctccagggaagggtctagagtgggtctcatctatttcgagtagtggtgcgggtacatactacgcagactccgtgaagggccggttcaccatctcccgcgacaattccaagaacacgctgtatctgcaaatgaacagcctgcgtgccgaggacaccgcggtatattactgtgcgaaatgggcggctaatttttcgggtaattataggcctaagtttgactactggggtcagggaaccctggtcaccgtctcgagc

SEQ ID NO: 443 - DNA, 366 bp, Homo sapiens
gaggtgcagctgttggagtctgggggaggcttggtacagcctggggggtccctgcgtctctcctgtgcagcctccggattcacctttaaggattatacgatgacgtgggtccgccaggctccagggaagggtctggagtgggtctcaaggatttcgtcgtcgggtgcgggtacatactacgcagactccgtgaagggccggttcaccatctcccgcgacaattccaagaacacgctgtatctgcaaatgaacagcctgcgtgccgaggataccgcggtatattactgtgcgaaagttgggaattctagtagggtgtctcatacttttgactactggggtcagggaaccctggtcaccgtctcgagc

SEQ ID NO: 444 - DNA, 366 bp, Homo sapiens
gaggtgcagctgttggagtctgggggaggcttggtacagcctggggggtccctgcgtctctcctgtgcagcctccggattcacctttgcgcagtattctatggggtgggtccgccaggctccagggaagggtctggagtgggtctcaaggatttcgagttcgggtagtggtacatactacgcagactccgtgaagggccggttcaccatctcccgcgacaattccaagaacacgctgtatctgcaaatgaacagcctgcgtgccgaggacaccgcggtatattactgtgcgaaagagggtaggcctcttacggcttctttgcgttttgactactggggtcagggaaccctggtcaccgtctcgagc

SEQ ID NO: 445 - DNA, 357 bp, Homo sapiens
gaggtgcagctgttggagtctgggggaggcttggtacggcctggggggtccctgcgtctctcctgtgcagcctccggattcacctttaggatgtatcagatgtattgggtccgccaggctccagggaagggtctagagtgggtctcaagtattagtgcgtctggtgcgggtacatactacgcagactccgtgaagggccggttcaccatctcccgcgacaattccaagaacacgctgtatctgcaaatgaacagcctgcgtgccgaggacaccgcggtatattactgtgcgaaaggtatgatgccgctgagttcttttgactactggggtcagggaaccctggtcaccgtctcgagc

SEQ ID NO: 446 - DNA, 357 bp, Homo sapiens
gaggtgcagctgttggagtctgggggaggcttggtacagcctggggggtccctgcgtctctcctgtgcagcctccggattcacctttgggaagtattctatgtcgtgggtccgccaggctccagggaagggtctagagtgggtctcaagtattctggattcgggtgtttttacatactacgcagactccgtgaagggccggttcaccatctcccgcgacaattccaagaacacgctgtacctgcaaatgaacagcctgcgtgccgaggacaccgcggtatattactgtgcgaaaaatgtttcgactccggaggggtttgactactggggtcagggaaccctggtcaccgtctcgagc

SEQ ID NO: 447 - DNA, 360 bp, Homo sapiens
gaggtgcagctgttggagtctgggggaggcttggtacagcctggggggtccctgcgtctctcctgtgcagcctccggattcacctttgagacttatgcgatgagttgggtccgccaggctccagggaagggtctagagtgggtctcatcgattggtatgcatggtaggcctacatactacgcagactccgtgaagggccggttcaccatctcccgcgacaattccaagaacacgctgtatctgcaaatgaacagcctgcgtgccgaggacaccgcggtatattactgtgcgaaacagaagacttctcagtcgggggcgtttgactactggggtcagggaaccctggtcaccgtctcgagc

SEQ ID NO: 448 - DNA, 357 bp, Homo sapiens
gaggtgcagctgttggagtctgggggaggcttggtacagcctggggggtccctgcgtctctcctgtgcagcctccggattcacctttagttcgtatacgatggagtgggtccgccaggctccagggaagggtctagagtgggtctcaaggatttcgtcgtcgggtgcgggtacatactacgcagactccgtgaagggccggttcaccatctcccgcgacaattccaggaacacgctgtatctgcaaatgaacagcctgcgtgccgaggacaccgcggtatattactgtgcgaaaaggacttctttggctgatgtgtttgactactggggtcagggaaccctggtcaccgtctcgagc

SEQ ID NO: 449 - DNA, 366 bp, Homo sapiens
gaggtgcagctgttggagtctgggggaggcttggtacagcctggggggtccctgcgtctctcctgtgcagcctccggattcacctttcgtgcgtatgcgatggcttgggtccgccaggctccagggaagggtctagagtgggtctcaacgatttctggtactggtgatcatacatactacgcagactccgtgaagggccggttcaccatctcccgcgacaattccaagaacacgctgtatctgcaaatgaacagcctgcgtgccgaggacaccgcggtatattactgtgcgaaagctcatggtaatccggtttcggatctttcttttgactactggggtcagggaaccctggtcaccgtctcgagc

SEQ ID NO: 450 - DNA, 360 bp, Homo sapiens
gaggtgcagctgttggagtctgggggaggcttggtacagcctggggggtccctgcgtctctcctgtgcagcctccggattcacctttcgtaggtatgatatgtcgtgggtccgccaggctccagggaagggtctagagtgggtctcaacgatttctagtacgggtcggactacatactacgcagactccgtgaagggccggttcaccatctcccgcgacaattccaagaacacgctgtatctgcaaatgaacagcctgcgtgccgaggacaccgcggtatattactgtgcgaaagcgcttgagactgtttctggggcgtttgactactggggtcagggaaccctggtcaccgtctcgagc

SEQ ID NO: 451 - DNA, 324 bp, Homo sapiens
gacatccagatgacccagtctccatcctccctgtctgcatctgtaggagaccgtgtcaccatcacttgccgggctagtcagaatattggttatagtttagattggtaccagcagaaaccagggaaagcccctaggctcctgatctattttggttcccggttgcaaagtggggtcccatcacgtttcagtggcagtggatctgggacagatttcactctcaccatcagcagtctgcaacctgaagattttgctacgtactactgtcaacagctgctgaagccgccttttacgttcggccaagggaccaaggtggaaatcaaacgg

SEQ ID NO: 452 - DNA, 324 bp, Homo sapiens
gacatccagatgacccagtctccatcctccctgtctgcatctgtaggagaccgtgtcaccatcacttgccgggcaagtcagaggattgggcctagtttattgtggtatcagcagaaaccagggaaagcccctaagctcctgatctataatacttccgtgttgcaaagtggggtcccatcacgtttcaggggcagtggatctgggacagatttcactctcaccatcagcagtctgcaacctgaagattttgctacgtactactgtcaacagacttggaattatccttttacgttcggccaagggaccaaggtggaaatcaaacgg

SEQ ID NO: 453 - DNA, 324 bp, Homo sapiens
gacatccagatgacccagtctccatcctccctgtctgcatctgtaggagaccgtgtcaccatcacttgccgggcaagtcagaatattgagtctggtttatggtggtatcagcagaaaccagggaaagcccctaagctcctgatctataattcgtcctttttgcaaagtggggtcccatcacgtttcagtggcagtggatctgggacagatttcactctcaccatcagcagtctgcaacctgaagattttgctacgtactactgtcaacagccgtggcagagtcctacgacgttcggccaagggaccaaggtggaaatcaaacgg

SEQ ID NO: 454 - DNA, 324 bp, Homo sapiens
gacatccagatgacccagtctccatcctccctgtctgcatctgtaggagaccgtgtcaccatcacttgccgggcaagtcagaatattggtcagaatttatggtggtaccagcagaaaccagggaaagcccctaagctcctgatctatgggtcgtccaagttgcaaagtggggtcccaccacgtttcagtggcagtggatctgggacagatttcactctcaccatcagcagtctgcaacctgaagattttgctacgtactactgtcaaccggcttggcaggggcctaagacgttcggccaagggaccaaggtggagatcaaacgg

SEQ ID NO: 455 - DNA, 324 bp, Homo sapiens
gacatccagatgacccagtctccatcctccctgtctgcatctgtaggagaccgtgtcaccatcacttgccgggcaagtcagtggatttcgcatcgtttaatgtggtatcagcagaaaccagggaaggcccctaagctcctgatctatagggcgtccgagttgcaaagtggggtcccatcacgtttcagtggcagtggatctgggacagatttcactctcaccatcagcagtctgcaacctgaagattttgctacgtactactgtcaacagaatgcgaggatgcctcatacgttcggccaagggaccaaggtggaaatcaaacgg

SEQ ID NO: 456 - DNA, 324 bp, Homo sapiens
gacatccagatgacccagtctccatcctccctgtctgcatctgtaggagaccgtgtcaccatcacttgccgggcaagtcagagtattgatactggtttagattggtatcagcagaaaccagggaaagcccctaagctcctgatctatagggtctccacgttgcaaagtggggtcccatcacgtttcagtggcagtggatctgggacagatttcactctcaccatcagcagtctgcaacctgaagattttgctacgtactactgtcaacagcttcgtcgtccgccttttacgttcggccaagggaccaaggtggaaatcaaacgg

SEQ ID NO: 457 - DNA, 324 bp, Homo sapiens
gacatccagatgacccagtctccatcctccctgtctgcatctgtaggagaccgtgtcaccatcacttgccgggcaagtcagaatattgggtctgcgttacaatggtatcagcagaaaccagggaaagcccctaagctcctgatctatcagatttccaagttgcaaagtggggtcccatcacgtttcagtggcagtggatctgggacagatttcactctcaccatcagcagtctgcaacctgaagattttgctacgtactactgtcaacagaatgagagttggccttttacgttcggccaagggaccaaggtggaaatcaaacgg

SEQ ID NO: 458 - DNA, 324 bp, Homo sapiens
gacatccagatgacccagtctccatcctccctgtctgcatctgtaggagaccgtgtcaccatcacttgccgggcaaatcagaggattgagagttctttaaattggtaccagcagaaaccagggaaagcccctaagctcctgatctatttgtcgtccattttgcaaagtggggtcccatcacgtttcagtggcagtggatctgggacagatttcactctcaccatcagcagtctgcaacctgaagattttgctacgtactactgtcaacagcagtggacttatccttttacgttcggccaagggaccaaggtggaaatcaaacgg

SEQ ID NO: 459 - DNA, 324 bp, Homo sapiens
gacatccagatgacccagtctccatcctccctgtcagcatctgtaggagaccgtgtcaccatcacttgccgggcaagtcagaatattggtaagtctttagattggtatcagcagaaaccagggaaagcccctaagctcctgatctatttgacttccatgttgcaaagtggggtcccatcacgtttcagtggcagtggatctgggacagatttcactctcaccatcagcagtctgcaacctgaagattttgctacgtactactgtcaacagttgcagcgtcctccttttacgttcggccaagggaccaaggtggaaatcaaacgg

SEQ ID NO: 460 - DNA, 324 bp, Homo sapiens
gacatccagatgacccagtctccatcctccctgtctgcatctgtaggagaccgtgtcaccatcacttgccgggcaagtcagtctattggtaagtggttatattggtatcagcagaaaccagggaaagcccctaagctcctgatctatgagtcgtccctgttgcaaagtggggtcccatcacgtttcagtggcagtggatctgggacagatttcactctcaccatcagcagtctgcaacctgaagattttgctacgtactactgtcaacagtatgacatttatccttttacgttcggccaagggaccaaggtggaaatcaaacgg

SEQ ID NO: 461 - DNA, 324 bp, Homo sapiens
gacatccagatgacccagtctccatcctccctgtctgcatctgtaggagaccgtgtcaccatcacttgccaggcaagtcagcatattggtgaggagttactttggtaccagcagaaaccagggaaagaccctaagctcctgatctattctggttccacgttgcaaagtggggtcccatcacgtttcagtggcagtggatctgggacagatttcactctcaccatcagcagtctgcaacctgaagattttgctacgtactactgtcaacagtatcttgtgtggcctaatacgttcggccaagggaccaaggtggaaatcaaacgg

SEQ ID NO: 462 - DNA, 324 bp, Homo sapiens
gacatccagatgacccagtctccatcctccctgtctgcatctgtaggagaccgtgtcaccatcacttgccgggcaagtcagaatattaagacttcgttattgtggtatcagcagaaaccagggaaagcccctaagctcctgatctattgggcttccaggttgcaaagtggggtcccatcacgtttcagtggcagtggatctgggacagatttcactctcaccatcagcagtctgcaacctgaagattttgctacgtactactgtcaacagactttggattggccttttacgttcggccaagggaccaaggtggaaatcaaacgg

SEQ ID NO: 463 - DNA, 324 bp, Homo sapiens
gacatccagatgacccagtctccatcctccctgtctgcatctgtaggagaccgtgtcaccatcacttgccgggcaagtcagccgatttggtataagttaaattggtatcagcaaaaaccagggaaagcccctaagctcctgatctatgcggcttccatgttgcaaagtggggtcccatcacgtttcagtggcagtggatctgggacagatttcactctcaccatcagcagtctgcaacctgaagattttgctacgtactactgtcaacagcagcttattcatccttatacgttcggccaagggaccaaggtggaaatcaaacgg

SEQ ID NO: 464 - DNA, 324 bp, Homo sapiens
gacatccagatgacccagtctccatcctccctgtctgcatctgtaggagaccgtgtcaccatcacttgccgggcaagtcaggatattgataataatttatggtggtatcagcagaaaccagggaaagcccctaagctcctgatctattcggcttccttgttgcaaagtggggtcccatcacgtttcagtggcagtggatctgggacagatttcactctcaccatcagcagtctgcaacctgaagattttgctacgtactactgtcaacaggcttggacgagtcctaagacgttcggccaagggaccaaggtggaaatcaaacgg

SEQ ID NO: 465 - DNA, 324 bp, Homo sapiens
gacatccagatgacccagtctccatcctccctgtctgcatctgtaggagaccgtgtcaccatcacttgccgggcaagtcagtctattagtgagtatttatattggtatcagcagaaaccagggaaagcccctaagctcctgatctatcatgcgtccgttttgcaacgtggggtcccatcacgtttcagtggcagtggatctgggacagatttcactctcaccatcagcagtctgcaacctgaagattctgctacgtactactgtcaacagtatgcgttttctcctaggacgttcggccaagggaccaaggtggaaatcaaacgg

SEQ ID NO: 466 - DNA, 324 bp, Homo sapiens
gacatccagatgacccagtctccatcctccctgtctgcatctgtaggagaccgtgtcaccatcacttgccgggcaagtcaggggattcatattagtttacagtggtaccagcagaaaccagggaaagcccctaagctcctgatctatcaggggtccattttgcaaagtggggtcccatcacgtttcagtggcagtggatctgggacagatttcactcttaccatcagcagtctgcaacctgaagattttgctacgtactactgtcaacagcagtatcattttccttttacgttcggccaagggaccaaggtggaaatcaaacgg

SEQ ID NO: 467 - DNA, 324 bp, Homo sapiens
gacatccagatgacccagtctccatcctccctgtctgcatctgtaggagaccgtgtcaccatcacttgccgggcaagtcagcctattttgcgtgcgttagcgtggtatcagcagaaaccagggaaagcccctaagctcctgatctatttgtcgtcccatttgcaaagtggggtcccatcacgtttcagtggcagtggatctgggacagatttcactctcaccatcagcagtctgcaacctgaagattttgctacgtactactgtcaacagaggtgggtgcagccttatacgttcggccaagggaccacggtggaaatcaaacgg

SEQ ID NO: 468 - DNA, 324 bp, Homo sapiens
gacatccagatgacccagtctccatcctccctgtctgcatctgtaggagaccgtgtcgccatcacttgccgggcaagtcagaggattatgaaggcgttaaattggtatcagcagaaaccagggaaagcccctaagctcctgatctatcaggcgtcccttttgcaaagtggggtcccatcacgtttcagtggcggtggatctgggacagatttcactctcaccatcagcagtctgcaacctgaagatttggctacgtactactgtcaacagacggatgtttggccttttacgttcggccaagggaccaaggtggaaatcaaacgg

SEQ ID NO: 469 - DNA, 324 bp, Homo sapiens
gacatccagatgacccagtctccatcctccctgtctgcatctgtaggagaccgtgtcaccatcacttgccgggcaagtcaggtgattgatcggactttatattggtaccagcagaaaccagggaaagcccctaagctcctgatctataatgtttcctttctgcaaagtggggtcccatcacgtttcagtggcagtggatctgggacagatttcactctcaccatcagcagtctgcaacctgaagattttgctacgtactactgtcaacagtatgagtcgaagccttatacgttcggccaagggaccaaggtggaaatcaaacgg

SEQ ID NO: 470 - DNA, 324 bp, Homo sapiens
gacatccagatgacccagtctccatcctccctgtctgcatctgtaggagaccgtgtcaccatcacttgccgggcaagtcagccgattaatacttttttatattggtaccagcagaaaccagggaaagcccctaggctcctgatctataagtcgtccattttgcaaagtggggtcccatcacgtttcagtggcagtggatctgggacagatttcactctcaccatcagcagtctgcaacctgaagattttgctacgtactactgtcaacagtataatctgtatccttttacgttcggccaagggaccaaggtggaaatcaaacgg

SEQ ID NO: 471 - DNA, 324 bp, Homo sapiens
gacatccagatgacccagtctccatcctccctgtcagcatctgtaggagaccgtgtcaccatcacttgccgggcaagtcagaatattgatcgtgagttacgttggtaccagcagaaaccagggaaagcccctatgctcctgatctatcatgcgtccaggttgcaaagtggggtcccatcacgtttcagtggcagtggatctgggacagatttcactctcactatcagcagtctgcaacctgaagattttgctacgtactactgtcaacagtatgctaattggcctctgacgttcggccaagggaccaaggtggaaatcaaacgg

SEQ ID NO: 472 - DNA, 324 bp, Homo sapiens
gacatccagatgacccagtctccatcctccctgtcagcatctgtaggagaccgtgtcaccatcacttgccgggcaagtcagtcgattggtcgtgagttacgttggtaccagcagaaaccagggaaagcccctatgttcctgatctatcatgcgtccaggttgcaaagtggggtcccatcacgtttcagtggcagtggatctgggacagatttcactctcactatcagcagtctgcaacctgaagattttgctacgtactactgtcaacagtatcatagttggcctctgacgttcggccaagggaccaaggtggaaatcaaacgg

SEQ ID NO: 473 - DNA, 324 bp, Homo sapiens
gacatccagatgacccagtctccatcctccctgtcagcatctgtaggagaccgtgtcaccatcacttgccgggcaagtcagtctattgggcgtgagttacgttggtaccagcagaaaccagggaaagcccctatgttcctgatctatcatgcgtccaggttgcaaagtggggtcccatcacgtttcagtggcagtggatctgggacagatttcactctcactatcagcagtctgcaacctgaagattttgctacgtactactgtcaacagtattttcattggcctctgacgttcggccaagggaccaaggtggaaatcaaacgg

SEQ ID NO: 474 - DNA, 324 bp, Homo sapiens
gacatccagatgacccagtctccatcctccctgtcagcatctgtaggagaccgtgtcaccatcacttgccgggcaagtcagtcgattggtcgtgagttacgttggtaccagcagaaaccagggaaagcccctatgttcctgatctatcatgcgtccaggttgcaaagaggggtcccatcacgtttcagtggcagtggatctgggacagatttcactctcactatcagcagtctgcaacctgaagattttgctacgtactactgtcaacagtatcatagttggcctctgacgttcggccaagggaccaaggtggaaatcaaacgg

SEQ ID NO: 475 - DNA, 324 bp, Homo sapiens
gacatccagatgacccagtctccatcctccctgtcagcatctgtaggagaccgtgtcaccatcacttgccgggcaagtcagaatattggtcgtgagttacgttggtaccagcagaaaccagggaaagcccctatgttcctgatctatcatgcgtccaggttgcaaagtggggtcccatcacgtttcagtggcagtggatctgggacagatttcactctcactatcagcagtctgcaacctgaagattttgctacgtactactgtcaacagtataattcgtggcctctgacgttcggccaagggaccaaggtggaaatcaaacgg

SEQ ID NO: 476 - DNA, 324 bp, Homo sapiens
gacatccagatgacccagtctccatcctccctgtcagcatctgtaggagaccgtgtcaccatcacttgccgggcaagtcagcatattggggttgagttacgttggtaccagcagaaaccaggggaagcccctatgttcctgatctatcatgcgtccaggttgcaaagtggggtcccatcacgtttcagtggcagtggatctgggacagatttcactctcactatcagcagtctgcaacctgaagattttgctacgtactactgtcaacagtattatgggtggcctctgacgttcggccaagggaccaaggtggaaatcaaacgg

SEQ ID NO: 477 - DNA, 324 bp, Homo sapiens
gacatccagatgacccagtctccatcctccctgtcagcatctgtaggagaccgtgtcaccatcacttgccgggcaagtcagtggattggtagggagttacgttggtaccagcagaaaccagggaaagcccctatgttcctgatctatcatgcgtccaggttgcaaagtggggtcccatcacgtttcagtggcagtggatctgggacagatttcactctcactatcagcagtctgcaacctgaagattttgctacgtactactgtcaacagtatcatgggtggcctctgacgttcggccaagggaccaaggtggaaatcaaacgg

SEQ ID NO: 478 - DNA, 324 bp, Homo sapiens
gacatccagatgacccagtctccatcctccctgtcagcatctgtaggagaccgtgtcaccatcacttgccgggcaagtcagtctattactaaggagctacgttggtaccagcagaaaccagggaaagcccctatgctcctgatctatcatgcgtccaggttgcaacgtggggtcccatcacgtttcagtggcagtggatctgggacagatttcactctcactatcagcagtctgcaacctgaagattttgctacgtactactgtcaacagtatcattcttggcctctgacgttcggccaagggaccaaggtggaaatcaaacgg

SEQ ID NO: 479 - DNA, 324 bp, Homo sapiens
gacatccagatgacccagtctccatcctccctgtcagcatctgtaggagaccgtgtcgccatcacttgccgggcaagtcaggggattgggcgggagttacgttggtaccagcagaaaccagggaaagcccctatgctcctgatccatcatgcgtccaggttgcaaagtggggtcccatcacgtttcagtggcagtggatctgggacagatttcactctcactatcagcagtctgcaacctgaagattttgctacgtactactgtcaacagtataatcgttggcctctgacgttcggccaagggaccaaggtggaaatcaaacgg

SEQ ID NO: 480 - DNA, 324 bp, Homo sapiens
gacatccagatgacccagtctccatcctccctgtcagcatctgtaggagaccgtgtcaccatcacttgccgggcaagtcagaatattgggcgtgagttacgttggtaccagcagaaaccaggggaagcccctatgctcctgatctatcatgcgtccaggttgcaaagtggggtcccatcacgtttcagtggcagtggatctgggacagatttcactctcactatcagcagtctgcaacctgaagattttgctacgtactactgtcaacagtatttttattggcctctgacgttcggccaagggaccaaggtggaaatcaaacgg

SEQ ID NO: 481 - DNA, 324 bp, Homo sapiens
gacatccagatgacccagtctccatcctccctgtcagcatctgtaggagaccgtgtcaccatcacttgccgggcaagtcagaatattactcgggagttacgttggtaccagcagaaaccagggaaagcccctatgctcctgatctatcatgcgtccaggttgcaaagtggggtcccatcacgtttcagtggcagtggatctgggacagatttcactctcactatcagcagtctgcaacctgaagattttgctacgtactactgtcaacagtatcatgggtggcctctgacgttcggccaagggaccaaggtggaaatcaaacgg

SEQ ID NO: 482 - DNA, 324 bp, Homo sapiens
gacatccagatgacccagtctccgtcctccctgtcagcatctgtaggagaccgtgtcaccatcacttgccgggcaagtcaggcgattggtcgggagttacgttggtaccagcagaaaccagggaaagcccctatgctcctgatccatcatgcgtccaggttgcaaagtggggtcccatcacgtttcagtggcagtggatctgggacagatttcactctcactatcagcagtctgcaacctgaagatttcgctacgtactactgtcaacagtataatggttggcctctgacgttcggccaagggaccaaggtggaaatcaaacgg

SEQ ID NO: 483 - DNA, 324 bp, Homo sapiens
gacatccagatgacccagtctccatcctccctgtcagcatctgtaggagaccgtgtcaccatcacttgccgggcaagtcaggatattggtcgggagttacgttggtaccagcagaaaccagggaaagcccctatgttcctgatctatcatgcgtccaggttgcaaagtggggtcccatcacgtttcagtggcagtggatctgggacagatttcactctcactatcagcagtctgcaacctgaagattttgctacgtactactgtcaacagtatggtttttggcctctgacgttcggccaagggaccaaggtggaaatcaaacgg

SEQ ID NO: 484 - DNA, 324 bp, Homo sapiens
gacatccagatgacccagtctccatcctccctgtcagcatctgtaggagaccgtgtcaccatcacttgccgggcaagtcaggatattacgaaggagttacgctggtaccagcagaaaccagggaaagcccctatgctcctgatccatcatgcgtccaggttgcaaagtggggtcccatcacgtttcagtggcagtggatctgggacagatttcactctcactatcagcagtctgcaacctgaagattttgctacgtactactgtcaacagtatcattcgtggcctctgacgttcggccaagggaccaaggtggaaatcaaacgg

SEQ ID NO: 485 - DNA, 324 bp, Homo sapiens
gacatccagatgacccagtctccatcctccctgtcagcatctgtaggagaccgtgtcaccatcacttgccgggcaagtcagtctattgggcgtgagttacgttggtaccagcagaaaccagggaaagcccctatgttcctgatctatcatgcgtccaggttgcaaagtggggtcccatcacgtttcagtggcagtggatctgggacagatttcactctcactatcagcagtctgcaacctgaagattttgctacgtactactgtcaacagtattatctttggcctctgacgttcggccaagggaccaaggtggaaatcaaacgg

SEQ ID NO: 486 - DNA, 324 bp, Homo sapiens
gacatccagatgacccagtctccatcctccctgtcggcatctgtaggagaccgtgtcaccatcacttgccgggcaagtcagcgtattggtgttgagttacgttggtaccagcagaaaccagggaaagcccctatgcccctgatctatcatgcgtccaggttgcaaagtggggtcccatcacgtttcagtggcagtggatctgggacagatttcactctcactatcagcagtctgcaacctgaagattttgctacgtactactgtcaacagtattttgggtggcctctgacgttcggccaagggaccaaggtggaaatcaaacgg

SEQ ID NO: 487 - DNA, 324 bp, Homo sapiens
gacatccagatgacccagtctccatcctccctgtcagcatctgtaggagaccgtgtcaccatcacttgccgggcaagtcagtggattgatcgtgagttacgttggtaccagcagaaaccagggaaagcccctatgctcctgatctatcatgcgtccaggttgcaaagtggggtcccatcacgtttcagtggcagtggatctgggacagatttcactctcactatcagcagtctgcaacctgaagattttgctacgtactactgtcaacagtatcatggttggcctctgacgttcggccaagggaccaaggtggaaatcaaacgg

SEQ ID NO: 488 - DNA, 324 bp, Homo sapiens
gacatccagatgacccagtctccatcctccctgtcagcatctgtaggagaccgtgtcaccatcacttgccgggcaagtcagtcgatttttaaggagttacgttggtaccagcagaaaccagaggaagcccctatgctcctgatccatcatgcgtccaggttgcaaagtggggtcccatcacgtttcagtggcagtggatctgggacagatttcactctcactatcagcagtctgcaacctgaagattttgctacgtactactgtcaacagtatcatggttggcctctgacgttcggccaagggaccaaggtggaaatcaaacgg

SEQ ID NO: 489 - DNA, 324 bp, Homo sapiens
gacatccagatgacccagtctccatcctccctgtcagcatctgtaggagaccgtgtcaccatcacttgccgggcaagtcaggagattgggcgtgagttacgttggtaccagcagaaaccaggggaagcccctatgcccctgatctaccatgcgtccaggttgcaaagtggggtcccatcacgtttcagtggcagtggatctgggacagatttcactctcactatcagcagtctgcaacctgaagatttcgctacgtactactgtcaacagtattttacgtggcctctgacgttcggccaagggaccaaggtggaaatcaaacgg

SEQ ID NO: 490 - DNA, 324 bp, Homo sapiens
gacatccagatgacccagtctccatcctccctgtcagcatctgtaggagaccgtgtcaccatcacttgccgggcaagtcagcctattggtattgagttacgttggtaccagcagaaaccagggaaagcccctatgcccctgatctatcatgcgtccaggttgcaaagtggggtcccatcacgtttcagtggcagtggatctgggacagatttcactctcactatcagcagtctgcaacctgaagattttgctacgtactactgtcaacagtatcatggttggcctctgacgttcggccaagggaccaaggtggaaatcaaacag

SEQ ID NO: 491 - DNA, 324 bp, Homo sapiens
gacatccagatgacccagtctccatcctccctgtcagcatctgtaggagaccgtgtcaccatcacttgccgggcaagtcagtctattggccgggagttacgttggtaccagcagaaaccagggaaagcccctatgctcctgatctatcatgcgtccaggttgcgaagtggggtcccatcacgtttcagtggcagtggatctgggacagatttcactctcactatcagcagtctgcaacctgaagattttgctacgtactactgtcaacagtataatggttggcctctgacgttcggccaagggaccaaggtggaaatcaaacgg

SEQ ID NO: 492 - DNA, 324 bp, Homo sapiens
gacatccagatgacccagtctccatcctccctgtcagcatctgtaggagaccgtgtcaccatcacttgccgggcaagtcagtctattggtcgggagttacgttggtaccagcagaaaccagggaaagcccctatgttcctgatctatcatgcgtccaggttgcaaagtggggtcccatcacgtttcagtggcagtggatctgggacagatttcactctcactatcagcagtctgcaacctgaagattttgctacgtactactgtcaacagtattatgattggcctctgacgttcggccaagggaccaaggtggaaatcaaacgg

SEQ ID NO: 493 - DNA, 324 bp, Homo sapiens
gacatccagatgacccagtctccatcctccctgtcagcatctgtaggagaccgtgtcaccatcacttgccgggcaagtcagcctattggtcgggagttacgttggtaccagcagaaaccagggaaagcccctatgttcctgatctatcatgcgtccaggttgcaaagtggggtcccatcacgtttcagtggcagtggatctgggacagatttcactctcactatcagcagtctgcaacctgaagattttgctacgtactactgtcaacagtattctgggtggcctctgacgttcggccaagggaccaaggtggaaatcaaacgg

SEQ ID NO: 494 - DNA, 324 bp, Homo sapiens
gacatccagatgacccagtctccatcctccctgtcagcatctgtaggagaccgtgtcaccatcacttgccgggcaagtcagtggattggtagggagttacgttggtaccagcagaaaccagggaaagcccctatgctcctgatctatcatgcgtccaggttgcaaagaggggtcccatcacgtttcagtggcagtggatctgggacagatttcactctcactatcagcagtctgcaacctgaagattttgctacgtactactgtcaacagtatcatgggtggcctctgacgttcggccaagggaccaaggtggaaatcaaacgg

SEQ ID NO: 495 - DNA, 324 bp, Homo sapiens
gacatccagatgacccagtctccatcctccctgtcagcatctgtaggagaccgtgtcaccatcacttgccgggcaagtcagtggattggtagggagttacgttggtaccagcagaaaccagggaaagcccctaagctcctgatctatcatgcgtccaggttgcaaagaggggtcccatcacgtttcagtggcagtggatctgggacagatttcactctcactatcagcagtctgcaacctgaagattttgctacgtactactgtcaacagtatcatgggtggcctctgacgttcggccaagggaccaaggtggaaatcaaacgg

SEQ ID NO: 496 - DNA, 324 bp, Homo sapiens
gacatccagatgacccagtctccatcctccctgtcagcatctgtaggagaccgtgtcaccatcacttgccgggcaagtcagtggattggtagggagttacgttggtaccagcagaaaccaggggaagcccctatgttcctgatctatcatgcgtccaggttgcaaagaggggtcccatcacgtttcagtggcagtggatctgggacagatttcactctcactatcagcagtctgcaacctgaagattttgctacgtactactgtcaacagtatcatgggtggcctctgacgttcggccaagggaccaaggtggaaatcaaacgg

SEQ ID NO: 497 - DNA, 324 bp, Homo sapiens
gacatccagatgacccagtctccatcctccctgtcagcatctgtaggagaccgtgtcaccatcacttgccgggcaagtcagtggattggtagggagttacgttggtaccagcagaaaccagggaaagcccctatgttcctgatccatcatgcgtccaggttgcaaagaggggtcccatcacgtttcagtggcagtggatctgggacagatttcactctcactatcagcagtctgcaacctgaagattttgctacgtactactgtcaacagtatcatgggtggcctctgacgttcggccaagggaccaaggtggaaatcaaacgg

SEQ ID NO: 498 - DNA, 324 bp, Homo sapiens
gacatccagatgacccagtctccatcctccctgtcagcatctgtaggagaccgtgtcaccatcacttgccgggcaagtcagtggattggtagggagttacgttggtaccagcagaaaccaggggaagcccctatgttcctgatccatcatgcgtccaggttgcaaagaggggtcccatcacgtttcagtggcagtggatctgggacagatttcactctcactatcagcagtctgcaacctgaagattttgctacgtactactgtcaacagtatcatgggtggcctctgacgttcggccaagggaccaaggtggaaatcaaacgg

SEQ ID NO: 499 - DNA, 324 bp, Homo sapiens
gacatccagatgacccagtctccatcctccctgtcagcatctgtaggagaccgtgtcaccatcacttgccgggcaagtcagtggattggtagggagttacgttggtaccagcagaaaccagggaaagcccctaagttcctgatctatcatgcgtccaggttgataaaaggggtcccatcacgtttcagtggcagtggatctgggacagatttcactctcactatcagcagtctgcaacctgaagattttgctacgtactactgtcaacagtatcatgggtggcctctgacgttcggccaagggaccaaggtggaaatcaaacgg

SEQ ID NO: 500 - DNA, 324 bp, Homo sapiens
gacatccagatgacccagtctccatcctccctgtcagcatctgtaggagaccgtgtcaccatcacttgccgggcaagtcagtggattggtagggagttacgttggtaccagcagaaaccagggaaagcccctaagttcctgatctatcatgcgtccaggttgcaaagaggggtcccatcacgtttcagtggcagtggatctgggacagatttcactctcactatcagcagtctgcaacctgaagattttgctacgtactactgtcaacagtatcatgggtttcctctgacgttcggccaagggaccaaggtggaaatcaaacgg

SEQ ID NO: 501 - DNA, 324 bp, Homo sapiens
gacatccagatgacccagtctccatcctccctgtcagcatctgtaggagaccgtgtcaccatcacttgccgggcaagtcagtggattggtagggagttacgttggtaccagcagaaaccagggaaagcccctaagttcctgatctatcatgcgtccaggttgtacaaaggggtcccatcacgtttcagtggcagtggatctgggacagatttcactctcactatcagcagtctgcaacctgaagattttgctacgtactactgtcaacagtatcatgggtggcctctgacgttcggccaagggaccaaggtggaaatcaaacgg

SEQ ID NO: 502 - DNA, 324 bp, Homo sapiens
gacatccagatgacccagtctccatcctccctgtcagcatctgtaggagaccgtgtcaccatcacttgccgggcaagtcagtggattggtagggagttacgttggtaccagcagaaaccagggaaagcccctaagttcctgatctatcatgcgtccaggttgcaatcaggggtcccatcacgtttcagtggcagtggatctgggacagatttcactctcactatcagcagtctgcaacctgaagattttgctacgtactactgtcaacagtatcatgggtggcctctgacgttcggccaagggaccaaggtggaaatcaaacgg

SEQ ID NO: 503 - DNA, 324 bp, Homo sapiens
gacatccagatgacccagtctccatcctccctgtcagcatctgtaggagaccgtgtcaccatcacttgccgggcaagtcagtggattggtagggagttacgttggtaccagcagaaaccagggaaagcccctaagctgctgatctatcatgcgtccaggttgcaatcaggggtcccatcacgtttcagtggcagtggatctgggacagatttcactctcactatcagcagtctgcaacctgaagattttgctacgtactactgtcaacagtatcatgggtggcctctgacgttcggccaagggaccaaggtggaaatcaaacgg

SEQ ID NO: 504 - DNA, 324 bp, Homo sapiens
gacatccagatgacccagtctccatcctccctgtcagcatctgtaggagaccgtgtcaccatcacttgccgggcaagtgcatggattggtagggagttacgttggtaccagcagaaaccagggaaagcccctaagttcctgatctatcatgcgtccaggttgataaaaggggtcccatcacgtttcagtggcagtggatctgggacagatttcactctcactatcagcagtctgcaacctgaagattttgctacgtactactgtcaacagtatcatgggtggcctctgacgttcggccaagggaccaaggtggaaatcaaacgg

SEQ ID NO: 505 - DNA, 324 bp, Homo sapiens
gacatccagatgacccagtctccatcctccctgtcagcatctgtaggagaccgtgtcaccatcacttgccgggcaagtggatggattggtagggagttacgttggtaccagcagaaaccagggaaagcccctaagttcctgatctatcatgcgtccaggttgtacaaaggggtcccatcacgtttcagtggcagtggatctgggacagatttcactctcactatcagcagtctgcaacctgaagattttgctacgtactactgtcaacagtatcatgggtggcctctgacgttcggccaagggaccaaggtggaaatcaaacgg

SEQ ID NO: 506 - DNA, 324 bp, Homo sapiens
gacatccagatgatccagtctccatcctccctgtcagcatctgtaggagaccgtgtcaccatcacttgccgggcaagtcagtggattggtagggagttacgttggtaccagcagaaaccagggaaagcccctaagctgctgatccatcatgcgtccaggttgcaaagaggggtcccatcacgtttcagtggcagtggatctgggacagatttcactctcactatcagcagtctgcaacctgaagattttactacgtactactgtcaacagtatcatgggtggcctctgacgttcggccaagggaccaaggtggaaatcaaacgg

SEQ ID NO: 507 - DNA, 324 bp, Homo sapiens
gacatccagatgacccagtctccatcctccctgtcagcatctgtaggagaccgtgtcaccatcacttgccgggcaagtcagtggattggtagggagttacgttggtaccagcagaaaccagggaaagcccctaagccgctgatctatcatgcgtccaggttgcaaagaggggtcccatcacgtttcagtggcagtggatctgggacagatttcactctcactatcagcagtctgcaacctgaagattttgctacgtactactgtcaacagtatcatgggtggcctctgacgttcggccaagggaccaaggtggaaatcgaacgg

SEQ ID NO: 508 - DNA, 324 bp, Homo sapiens
gacatccagatgacccagtctccatcctccctgtcagcatctgtaggagaccgtgtcaccatcacttgccgggcaagtcagtggattggtagggagttacgttggtaccagcagaaaccagggaaagaccctaagccgctgatctatcatgcgtccaggttgcaaagaggggtcccatcacgtttcagtggcagtggatctgggacaggtttcactctcactatcagcagtctgcaacctgaagattttgctacgtactactgtcaacagtatcatgggtggcctctgacgttcggccaagggaccaaggtggaaatcaaacgg

SEQ ID NO: 509 - DNA, 324 bp, Homo sapiens
gacatccagatgacccagtctccatcctccctgtcagcatctgtaggagaccgtgtcaccatcacttgccgggcaagtcagtggattggtagggagttacgttggtaccagcagaaaccagggaaagaccctaaggtgctgatctttcatgcgtccaggttgcaaagaggggtcccatcacgtttcagtggcagtggatctgggacagatttcactctcactatcagcagtctgcaacctgaagattttgctacgtactactgtcaacagtatcatgggtggcctctgacgttcggccaagggaccaaggtggaaatcaaacgg

SEQ ID NO: 510 - DNA, 324 bp, Homo sapiens
gacatccagatgacccagtctccatcctccctgtcagcatctgtaggagaccgtgtcaccatcacttgccgggcaagtcagtggattggtagggagttacgttggtaccagcagaaaccagggaaagcccctaagcagctgatctatcatgcgtccaggttgcaaagaggggtcccatcacgtttcagtggcagtggatctgggacagatttcactctcactatcagcagtctgcaacctgaagattttaccacgtactactgtcaacagtatcatgggtggcctctgacgttcggccaagggaccaaggtggaaatcaaacgg

SEQ ID NO: 511 - DNA, 324 bp, Homo sapiens
ggcatccagatgacccagtctccatcctccctgtcagcatctgtaggagaccgtgtcaccatcacttgccgggcaagtcagtggattggtagggagttacgttggtaccagcagaaaccagggaaagcctctaagccgctgatctatcatgcgtccaggttgcaaagaggggtcccatcacgtttcagtggcagtggatctgggacagatttcactctcactatcagcagtctgcaacctgaagattttgctacgtactactgtcaacagtatcatgggtggcctctgacgttcggccaagggaccaaggtggaaatcaaacgg

SEQ ID NO: 512 - DNA, 324 bp, Homo sapiens
gacatccagatgacccagtctccatcctccctgtcagcatctgtaggagaccgtgtcaccatcacttgccgggcaagtcagtggattggtagggagttacgttggtaccagcagaaaccagggaaagaccctaagctgctgatccatcatgcgtccaggttgcaaagaggggtcccatcacgtttcagtggcagtggatctgggacagatttcactctcactatcagtagtctgcaacctgaagattttgctacgtactactgtcaacagtatcatgggtggcctctgacgttcggccaagggaccaaggtggaaatcaaacgg

SEQ ID NO: 513 - DNA, 324 bp, Homo sapiens
gacatccagatgacccagtttccatcctccctgtcagcatctgtaggagaccgtgtctccatcacttgccgggcaagtcagtggattggtagggagttacgttggtaccagcagaaaccagggaaagaccctaagccgctgatctatcatgcgtccaggttgcaaagaggggtcccatcacgtttcagtggcagtggatctgggacagatttcactctcactatcagcagtctgcaacctgaagatttagctacgtactactgtcaacagtatcatgggtggcctctgacattcggccaagggaccaaggtggaaatcaaacgg

SEQ ID NO: 514 - DNA, 324 bp, Homo sapiens
gacatccagatgacccagtctccatcctccctgtcagcatctgtaggagaccgtgtcaccatcacttgccgggcaagtcagtggattggtagggagttacgttggtaccagcagaaaccagggaaagcccctaagccgctgatctatcatgcgtccaggttgcaaagaggggtcccatcacgtttcagtggcagtggatctgggacagatttcactctcactatcagcagtctgcaacctgaagattttgctacgtactactgtcaacagtatcatgggtggcctctgacgttcggccaagggaccaaggtggaaatcaaacgg

SEQ ID NO: 515 - DNA, 324 bp, Homo sapiens
gacatccagatgacccagtctccatcctccctgtcagcatctgtaggagaccgtgtcatcatcacttgccgggcaagtcagtggattggtagggagttacgttggtaccagcagaaaccagggaaagcccctaagctgctgatctttcatgcgtccaggttgcaaagaggggtcccatcacgtttcagtggcagtggatctgggacagatttcactctcactatcagcagtctgcaacctgaagattttgctacgtactactgtcaacagtatcatgggtggcctctgacgttcggccaagggaccaaggtggaaatcaaacgg

SEQ ID NO: 516 - DNA, 324 bp, Homo sapiens
gacatccagatgacccagtctccatcctccctgtcagcatctgtaggagaccgtgtcaccatcacttgccgggcaagtcagtggattggtagggagttacgttggtaccagcagaaaccagggaaatcccctaagccgctgatctatcatgcgtccaggttgcaaagaggggtcccatcacgtttcagtggcagtggatctgggacagatttcactctcattatcagcagtctgcaacctgaagattttgctacgtactactgtcaacagtatcatgggtggcctctgacgctcggccaagggaccaaggtggaaatcaaacgg

SEQ ID NO: 517 - DNA, 324 bp, Homo sapiens
gacatccagatgacccagtctccaccctccctgtcagcatctgtaggagaccgtgtcaccatcacttgccgggcaagtcagtggattggtagggagttacgttggtgccagcagaaaccagggaaagcccctaagctgctgatctttcatgcgtccaggttgcaaagaggggtcccatcacgtttcagtggcagtggatctgggacagatttcactctcactatcagcagtctgcaacctgaagattttgctacgtactactgtcaacagtatcatgggtggcctctgacgttcggccaagggaccaaggtggaaatcaaacgg

SEQ ID NO: 518 - DNA, 324 bp, Homo sapiens
gacatccagatgacccagtctccatcctccctgtcagcatctgtaggagaccgtgtcaccatcacttgccgggcaagtcagtggattggtagggagttacgttggtaccagcagaaaccagggaaagcccctaagctgctgatccatcatgcgtccaggttgcaaagaggggtcccatcacgtttcagtggcagtggatctgggacagatttcactctcactatcagcagtctgcaacctgaagattttgctacgtactactgtcaacagtatcatgggtggcctctgacgttcggccaagggaccaaggtggaaatcaaacgg

SEQ ID NO: 519 - DNA, 324 bp, Homo sapiens
gacatccagatgacccagtctccatcctctctgtcagcatctgtaggagaccgtgtcaccatcacttgccgggcaagtcagtggattggtagggagttacgttggtaccagcagaaaccagggaaagcccctaagctgctgatccatcatgcgtccaggttgcaaagaggggtcccatcacgtttcagtggcagtggatctggggcagatttcactctcactatcagcagtctgcaacctgaagattttgctacgtactactgtcaacagtatcatgggtggcctctgacgttcggccaatggaccaaggtggaaatcaaacgg

SEQ ID NO: 520 - DNA, 324 bp, Homo sapiens
gacatccagatgacccagtctccatcctccctgtcagcatctgtaggagaccgtgtcaccatcacttgccgggcaagtcagtggattggtagggagttacgttggtaccagcagaaaccagggaaagcccctaagctgctgttccatcatgcgtccaggttgcaaagaggggtcccatcacgtttcagtggcagtggatctgggacagatttcactctcactatcagcagtctgcaacctgaagattttgctacatactactgtcaacagtatcatgggtggcctctgacgttcggccaagggaccaaggtggaaatcaaacgg

SEQ ID NO: 521 - DNA, 324 bp, Homo sapiens
gacatccagatgacccagtctccatcctccctgtcagcatctgtaggagaccgtgtcaccatcacttgccgggcaagtcagtggattggtagggagttacgttggtaccagcagaaaccagggaaagcccctaagctgctgatctttcatgcgtccaggttgcaaagaggggtcccatcacgtttcagtggcagtggatctgggacagatttcactctcactatcagcagtctgcaacctgaagattttgctacgtactactgtcaacagtatcatgggtggcctctgacgttcggccaagggacaaaggtggaaatcaaacgg

SEQ ID NO: 522 - DNA, 324 bp, Homo sapiens
gacatccagatgacccagtctccatcctccctgtcagcatctgtaggagaccgtgtcaccatcacttgccgggcaagtcagtggattggtagggagttacgttggtaccagcagaaaccagggaaagcccctatgccgctgatctatcatgcgtccagattgcaaagaggggtcccatcacgtttcagtggcagtggatctgggacagatttcactctcactatcagcagtctgcaacctgaagattttgctacgtactactgtcaacagtatcatgggtggcctctgacgttcggccaagggaccaaggtggaaatcaaacgg

SEQ ID NO: 523 - DNA, 324 bp, Homo sapiens
gacatccagatgacccagtctccatcctccctgtcagcatctgtaggagaccgtgtcaccatcacttgccgggcaagtcagtggattggtagggagttacgttggtaccagcagaaaccagggaaagcccctaagctgctgatctttcatgcgtccaggttgcaaagaggggtcccatcacgtttcagtggcagtggatctgggacagatttcactctcactatcagcagtctgcaacctgaagattttgctgcgtactactgtcaacagtatcatgggtggcctctgacgttcggccaagggaccaaggtggaaatcaaacgg

SEQ ID NO: 524 - DNA, 324 bp, Homo sapiens
gacatccagatgacccagtctccatcctccctgtcagcatctgtaggagaccgtgtcaccatcacttgccggacaagtcagtggattggtagggagttacgttggtaccagcagaaaccagggaaagcccctaagctgctgatccatcatgcgtccaggttgcaaagaggggtcccatcacgtttcagtggcagtggatctgggacagatttcactctcactatcagcagtctgcaacctgaagattttgctacgtactactgtcaacagtatcatgggtggcctctgacgttcggccaagggaccaaggtggaaatcaaacgg

SEQ ID NO: 525 - DNA, 324 bp, Homo sapiens
gacatccagatgacccagtctccatcctccctgtcagcatctgtaggagaccatgtcaccatcacttgccgggcaagtcagtggattggtagggagttacgttgggaccagcagaaaccagggaaagcccctaagctgctgatctatcatgcgtccaggttgcaaagaggggtcccatcacgtttcagtggcagtggatctgggacagatttcactctcactatcagcagtctgcaacctgaagattttgctacgtactactgtcaacagtatcatggatggcctctgacgttcggccaagggaccaaggtggaaatcaaacgg

SEQ ID NO: 526 - DNA, 324 bp, Homo sapiens
gacatccagatgacccagtctccatcctccctgtcagcatctgtaggagaccgtgtcaccatcacctgccgggcaagtcagtggattggtagggagttacgttggtaccagcagaaaccagggaaagcccctacgccgctgatctatcatgcgtccaggttgcaaagaggggtcccatcacgtttcagtggcagtggatctgggacagatttcactctcactatcagcagtctgcaacctgaagattttgctacgtactactgtcaacagtatcatgggtggcctctgacgttcggccaagggaccaaggtggaaatcaaacgg

SEQ ID NO: 527 - DNA, 324 bp, Homo sapiens
gacatccagatgacccagtctccatcctccctgtcagcatctgtaggagaccgtgtcaccatcacttgccgggcaagtcagtggattggtagggagttacgttggtaccagcagaaaccagggaaagcccctaagcagctgatctatcatgcgtccaggttgcaaagaggggtcccatcacgtttcagtggcagtggatctgggtcagatttcactctcactatcagcagtctgcaacctgaagattttgctacgtactactgtcaacagtatcatgggtggcctctgacgttcggccaagggaccaaggcggaaatcaaacgg

SEQ ID NO: 528 - DNA, 324 bp, Homo sapiens
gacatccagatgacccagtctccatcctccctgtcagcatctgtaggagaccgtgtcgccatcacttgccgggcaagtcagtggattggtagggagttacgttggtaccagcagaaaccagggaaagcccctaagctgctgatctttcatgcgtccaggttgcaaagaggggtcccatcacgtttcagtggcagtggatctgggacagatttcactctcactatcagcagtctgcaacctgaagattttgctacgtactactgtcaacagtatcatgggtggcctctgacgttcggccaagggaccaaggtggaaatcaaacgg

SEQ ID NO: 529 - DNA, 324 bp, Homo sapiens
ggcatccagatgacccagtctccatcctccctgtcagcatctgtaggagaccgtgtcaccatcacttgccgggcaagtcagtggattggtagggagttacgttggtaccagcagaaaccagggaaagaccctaagccgctgatctatcatgcgtccaggttgcaaagaggggtcccatcacgtttcagtggcagtggatctgggacagatttcactctcactatcagcagtctgcaacctgaagattttgctacgtactactgccaacagtatcatgggtggcctctgacgttcggccaagggaccaaggtggaaatcaaacgg

SEQ ID NO: 530 - DNA, 324 bp, Homo sapiens
gacatccagatgacccagtctccatcctccctgtcagcatctgtaggagaccgtgtcaccatcacttgccgggcaagtcagtggattggtagggagttacgttggtaccagcagaaaccagggaaagcccctaaggtgctgatctttcatgcgtccaggttgcaaagaggggtcccatcacgtttcagtggcagtggatctgggacagatttcactctcactatcagcagtctgcaacctgaagattttgctacgtactactgtcaacagtatcatgggtggcctctgacgttcggccaagggaccaaggtggaaatcaaacgg

SEQ ID NO: 531 - DNA, 324 bp, Homo sapiens
gacatccagatgacccagtctccatcctccctgtcagcatctgtaggagaccgtgtcaccatcacttgccgggcaagtcagtggattggtagggagttacgttggtaccagcagaaaccagggaaagaccctaagccgctgatctatcatgcgtccaggttgcaaagaggggtcccatcacgtttcagtggcagtggatctgggacagatttcactctcactatcagcagtttgcaacctgaagattttgctacgtactactgtcaacagtatcatgggtggcctctgacgtccggccaagggaccaaggtggaaatcaaacgg

SEQ ID NO: 532 - DNA, 324 bp, Homo sapiens
gacatccagatgacccagtctccatcctccctgtcagcatctgtaggagaccgtgtcaccatcacttgccgggcaagtcagtggattggtagggagttacgttggtaccagcaggaaccaggggaagcccctaagccgctgatctatcatgcgtccaggttgcaaagaggggtcccatcacgtttcagtggcagtggatctgggacagatttcactctcactatcagcagtctgcaacctgatgattctgctacgtactactgtcaacagtatcatgggtggcctctgacgttcggccaagggaccagggtggaaatcaaacgg

SEQ ID NO: 533 - DNA, 324 bp, Homo sapiens
gacatccagatgacccagtctccatcctccctgtcagcatctgtaggagaccgtgtcaccatcacttgccgggcaagtcagtggattggtagggagttacgttggtaccagcaggaaccagggaaagcccctaagctgctgatccatcatgcgtccaggttgcaaagaggggtcccatcacgtttcagtggcagtggatctgggacagatttcactctcactatcagcagtctgcaacctgaagattttgctacgtactactgtcaacagtatcatgggtggcctctgacgttcggccaagggaccaaggtggaaatcaaacgg

SEQ ID NO: 534 - DNA, 324 bp, Homo sapiens
gacatccagatgacccagtctccatcctccctgtcagcatctgtaggagaccgtgtcaccatcacttgccgggcaagtcagtggattggtagggagttacgttggtaccagcagaaaccagggaaagcccctaagctgctgatctttcatgcgtccaggttgcaaagaggggtcccatcacgtttcagtggcagtggatctgggacagatttcactctcactatcagcagtctgcaacctgaagattatgctacgtactactgtcaacagtatcatgggtggcctctgacgttcggccaagggaccaaggtggaaatcaaacgg

SEQ ID NO: 535 - DNA, 324 bp, Homo sapiens
gacatccagatgacccagtctccatcctccctgtcagcatctgtaggagaccgtgtcaccatcacttgccgggcaagtcagtggattggtagggagttacgttggtaccagcagaaaccagggaaagcccctaacccgctgatctatcatgcgtccaggttgcaaagaggggtcccatcacgtttcagtggcagtggatctgggacagatttcactctcactatcagcagtctgcaacctgaagattttgctacgtactactgtcaacagtatcatgggtggcctctgacgttcggccaagggaccaaggtggaaatcaaacgg

SEQ ID NO: 536 - DNA, 324 bp, Homo sapiens
gacatccagatgacccagtctccatcctccctgtcagcatctgtaggagaccgtgtcaccatcacttgccgggcaagtcagtggattggtagggagttacgttggtaccagcagaaaccagggaaagcccctaagcagctgatctatcatgcgtccaggttgcaaagaggggtcccatcacgtttcagtggcagtggatctgggacagatttcactctcactatcagcagtctgcaacctgaagattttgctacgtactactgtcaacagtatcatgggtggcctctgacgtccggccaagggaccaaggtggaaatcaaacgg

SEQ ID NO: 537 - DNA, 324 bp, Homo sapiens
gacatccagatgacccagtctccatcctccctgtcagcatccgtaggagaccgtgtcaccatcacttgccgggcaagtcagtggattgatagggagttacgttggtaccagcagaaaccagggaaagcccctaagcagctgatctatcatgcgtccaggttgcaaagaggggtcccatcacgtttcagtggcagtggatctgggacagatttcactctcactatcagcagtctgcaacctgaagattttgctacgtactactgtcaacagtatcatgggtggcctctgacgttcggccaagggaccaaggtggaaatcaaacgg

SEQ ID NO: 538 - DNA, 324 bp, Homo sapiens
gacatccagatgacccagtctccatcctccctgtcagcatctgtaggagaccgtgtcaccatcacttgccgggcaagtcagtggattggcagggagttacgttggtaccagcagaaaccagggaaagcccctaagccgctgatctatcatgcgtccaggttgcaaagaggggtcccatcacgtttcagtggcagtcgatctgggacagatttcactctcactatcagcagtctgcaacctgaagattttgctacgtactactgtcaacagtatcatgggtggcctctgacgttcggccaagggaccaaggtggaaatcaaacgg

SEQ ID NO: 539 - DNA, 324 bp, Homo sapiens
gacatccagatgacccagtctccatcctccctgtcagcatctgtaggagaccgtgtcaccatcacgtgccgggcaagtcagtgggttggtagggagttacgttggtaccagcagataccagggaaagcccctaagcagctgatctatcatgcgtccaggttgcaaagaggggtcccatcacgtttcagtggcagtggatctgggacagatttcactctcactatcggcagtctgcaacctgaagattttgctacgtactactgtcaacagtatcatgggtggcctctgacgttcggccaagggaccaaggtggaaatcaaacgg

SEQ ID NO: 540 - DNA, 324 bp, Homo sapiens
gacatccagatgacccagtctccatcctccctgtcagcatctgtaggagaccatgtcaccatcacttgccgggcaagtcagtggattggtagggagttacgttgggaccagcagaaaccagggaaagcccctaagttcctgatctatcatgcgtccaggttgcaaagaggggtcccatcacgtttcagtggcagtggatctgggacagatttcactctcactatcagcagtctgcaacctgaagattttgctacgtactactgtcaacagtatcatggatggcctctgacgttcggccaagggaccaaggtggaaatcaaacgg

SEQ ID NO: 541 - DNA, 324 bp, Homo sapiens
gacatccagatgacccagtctccatcctccctgtcagcatctgtaggagaccgtgtcaccatcacttgccgggcaagtcagtggattggtagggagttacgttggtaccagcagaaaccagggaaagcccctaagggcctgatctatcatgcgtccaggttgcaaagaggggtcccatcacgtttcagtggcagtggatctgggacagatttcactctcactatcagcagtctgcaacctgaagattttgctacgtactactgtcaacagtatcatgggtggcctctgacgttcggccaagggaccaaggtggaaatcaaacgg

SEQ ID NO: 542 - DNA, 324 bp, Homo sapiens
gacatccacatgacccagtctccatcctccctgtctgcatctgtaggagaccgtgtcaccatcacttgccgggcaagtcagcatattgggcgttcgttacagtggtaccagcagaaaccagggaaagcccctaagctcctgatctattatacgtccattttgcaaagtggggtcccatcacgtttcagtggcagtggatctgggacagatttcactctcactatcagcagtctgcaacctgaagattttgctacgtactactgtcaacagcagggggagtttccttttacgttcggccaagggaccaaggtggaaatcaaacgg

SEQ ID NO: 543 - DNA, 324 bp, Homo sapiens
gacatccagatgacccagtctccatcctccctgtctgcatctgtaggagaccgtgtcaccatcacttgccgggcaagtcagcatattaagaattttttatattggtaccagcagaaaccagggaaagcccctaagctcctgatctatcatgcgtccacgttgcaaagtggggtcccatcacgtttcagtggcagtggatctgggacagatttcactctcaccatcagcagtctgcaacctgaagattttgctacgtactactgtcaacagtatatggatgagcctcgtacgttcggccaagggaccaaggtggaaatcaaacgg

SEQ ID NO: 544 - DNA, 324 bp, Homo sapiens
gacatccagatgacccagtctccatcctccctgtctgcatctgtaggagaccgtgtcaccatcacttgccgggcaagtcaggttattagtgttgctttaaattggtaccagcagaaaccagggaaagcccctaagctcctgatctatcaggggtccattttgcaaagtggggtcccatcacgtttcagtggcagtggatctgggacagatttcactctcaccatcagcagtctgcaacctgaagattttgctacgtactactgtcaacagagttggcagtggccttttacgttcggccaagggaccaaggtggaaatcaaacgg

SEQ ID NO: 545 - DNA, 324 bp, Homo sapiens
gacatccagatgacccagtctccatcctccctgtctgcatctgtaggagaccgtgtcaccatcacttgccgggcaagtcaggctattggtaatatgttatattggtaccagcagaaaccagggaaagcccctaagctcctgatctataatgcgtcctatttgcaaagtggggtcccatcacgtttcagtggcagtggatctgggacagatttcactctcaccatcagcagtctgcaacctgaagattatgctacgtactactgtcaacagagggagatgattcctcatacgttcggccaagggaccaaggtgggaatcaaacgg

SEQ ID NO: 546 - DNA, 324 bp, Homo sapiens
gacatccagatgacccagtctccatcctccctgtctgcatctgtaggagaccgtgtcaccatcacttgccgggcaagtcaggatattggtgaggagttactttggtatcagcagaaaccagggaaagcccctaagctcctgatctattcggcgtcctcgttgcgaagtggggtcccatcacgtttcagtggcagtggatctgggacagatttcactctcaccatcagcagtctgcaacctgaagattttgctacgtactactgtcaacagtatgtgacttctcctaatacgttcggccaagggaccaaggtggaaatcaaacgg

SEQ ID NO: 547 - DNA, 324 bp, Homo sapiens
gacatccagatgacccagtctccatcctccctgtctgcatctgtaggagaccgtgtcaccatcacttgccgggcaagtcaggggattcagacgtttttatattggtaccagcagaaaccagggaaagcccctaagctcctgatctattctagttccattttgcaaagaggggtcccatcacgtttcagtggcagtggatctgggacagatttcactctcaccatcagcagtctgcaacctgaagattttgctacgtactactgtcaacagtatgggaattatccttttacgttcggccaagggaccaaggtggaaatcaaacgg

SEQ ID NO: 548 - DNA, 324 bp, Homo sapiens
gacatccagatgacccagtctccatcctccctgtctgcatctgtaggagaccgtgtcaccatcacttgccgggcaagtcagaatattgatcgtgagttacgttggtaccagcagaaaccagggaaagcccctatgctcctgatctatcatgcgtccaggttgcaaagtggggtcccatcacgtttcagtggcagtggatctgggacagatttcactctcaccatcagcagtctgcaacctgaagattttgctacgtactactgtcaacagtatcatgattttcctcttacgttcggccaagggaccaaggtggaaatcaaacgg

SEQ ID NO: 549 - DNA, 324 bp, Homo sapiens
gacatccagatgacccagtctccatcctccctgtctgcatctgtaggagaccgtgtcaccatcacttgccgggcaagtcagaatattgatcgtgagttacgttggtaccagcagaaaccagggaaagcccctatgttcctgatctatcatgcgtccaggttgcaacgtggggtcccatcacgtttcagtggcagtggatctgggacagatttcactctcaccatcagcagtctgcaacctgaagattttgctacgtactactgtcaacagtatcatgattttcctcttacgttcggccaagggaccaaggtggaaatcaaacgg

SEQ ID NO: 550 - DNA, 324 bp, Homo sapiens
gacatccagatgacccagtctccatcctccctgtctgcgtctgtaggagaccgtgtcaccatcacttgccgggcaagtcagaatattgatcgtgagttacgttggtaccagcagaaaccagggaaagcccctatgttcctgatctatcatgcgtccaggttgcaacatggggtcccatcacgtttcagtggcagtggatctgggacagatttcactctcaccatcagcagtctgcaacctgaagattttgctacgtactactgtcaacagtatcatgattttcctcttacgttcggccaagggaccaaggtggaaatcaaacgg

SEQ ID NO: 551 - DNA, 324 bp, Homo sapiens
gacatccagatgacccagtctccatcctccctgtctgcatctgtaggagaccgtgtcaccatcacttgccgggcaagtcagaatattgatcgtgagttacgttggtaccagcagaaaccagggaaagcccctgtgttcctgatctatcatgcgtccaggttgcaaagtggggtcccatcacgtttcagtggcagtggatctgggacagatttcactctcaccatcagcagtctgcaacctgaagattttgctacgtactactgtcaacagtatcatgattttcctcttacgttcggccaagggaccaaggtggaaatcaaacgg

SEQ ID NO: 552 - DNA, 324 bp, Homo sapiens
gacatccagttgacccagtctccatcctccctgtctgcatctgtaggagaccgtgtcaccatcacttgccgggcaagtcagaatattgatcgtgagttacgttggtaccagcagaaaccagggaaagcccctatgttcctgatctatcatgcgtccaggttgcaaagtggggtcccatcacgtttcagtggcagtggatctgggacagatttcactctcaccatccgcagtctgcaacctgaagattttgctacgtactactgtcaacagtatcatgattttcctcttacgtccggccaagggaccaaggtggaaatcaaacgg

SEQ ID NO: 553 - DNA, 324 bp, Homo sapiens
gacatccagatgacccagtctccatcctccctgtctgcatctgtaggagaccgtgtcaccatcacttgccgggcaagtcagaatattgatcgtgagttacgttggtaccagcagaaaccagggaaagcccctatgttcctgatctatcatgcgtccaggttgcaaagtggggtcccatcacgtttcagcggcagtggatctgggacagatttcactctcaccatcagcagtctgcaacctgaagattatgctacgtactactgtcaacagtatcatgattttcctcttacgttcggccaagggaccaaggtggaaatcaaacgg

SEQ ID NO: 554 - DNA, 324 bp, Homo sapiens
gacatccagatgacccagtctccatcctccctgtctgcatctgtaggagaccgtgtcaccatcacttgccgggcaagtcagaatattgatcgtgagttacgttggtaccagcagaaaccagggaaagcccctatgttcctgatctatcatgcgtccaggttgcaaagtggggtcccatcacgtttcagtggcagtggatctgggacagatttcactctcaccatcagcagtctgcaacctgaagattttgctacgtactactgtcaacagtatcatgattttcctcttacgttcggccaagggaccaaggtggaaatcaaacgg

SEQ ID NO: 555 - DNA, 324 bp, Homo sapiens
gacatccagatgacccagtctccatcctccctgtctgcatctgtaggagaccgtgtcaccatcacttgccgggcaagtcagaatattgatcgtgagttacgttggtaccagcagaaaccagggaaagcccctatgcccctgatctatcatgcgtccaggttgcaaagaggggtcccatcacgtttcagtggcagaggatctgggacagatttctctctcaccatcagcagtctgcaacctgaagattttgctacgtactactgtcaacagtatcatgattttcctcttacgttcggccaagggaccaaggtggaaatcaaacgg

SEQ ID NO: 556 - DNA, 324 bp, Homo sapiens
gacatccagatgacccagtctccatcctccctgtctgcatctgtaggagaccgtgtcaccatcacttgccgggcaagtcagaatattggtcgtgagttacgttggtaccagcagaaaccagggaaagcccctatgttcctgatctatcatgcgtccaggttgcaaagaggggtcccatcacgtttcagtggcagtggttctgggacagatttcactctcaccatcagcagtctgcaacctgaagattttgctacgtactactgtcaacagtatcatgattttcctcttacgttcggccaggggaccaaggtggaaatcaaacgg

SEQ ID NO: 557 - DNA, 324 bp, Homo sapiens
gacatccagatgacccagtctccatcctccctgtctgcatctgtaggagaccgtgtcaccatcacttgccgggcaagtcagaatattgatcgtgagttacgttggtaccagcagaaaccagggaaagcccctaggttcctgatctatcatgcgtccaggttgcaaagtggggtcccatcacgtttcagtggcagtggatctgggacagatttcactctcaccatcagcagtctgcaacctgaagattttgctacgtactactgtcaacagtatcatgattttcctcttacgatcggccaagggaccaaggtggaaatcaaacgg

SEQ ID NO: 558 - DNA, 324 bp, Homo sapiens
gacatccagatgacccagtctccatcctccctgtctgcatctgtaggagaccgtgtcaccatcacttgccgggctagtcagaatattggtcgtgagttacgttggtaccagcagaaaccagggaaagcccctatgttcctgatctatcatgcgtccaggttgcaaagtggggtcccatcacgtttcagtggcagtggatctgggacagatttcactctcaccatcagcagtctgcaacctgaagattttgctacgtactactgtcaacagtatcatgattttcctcttacgttcggccaagggaccaaggtggaaatcaaacgg

SEQ ID NO: 559 - DNA, 324 bp, Homo sapiens
gacatccagatgacccagtctccatcctccctgtctgcatctgtaggagaccgtgtcaccatcacttgccgggcaagtcagaatattgatcgtgagttacgttggtaccagcagaaacctgggaaagaccctatgttcctgatctatcatgcgtccaggttgcaaagaggggtcccatcacgtttcagtggcagtggatctgggacatatttcactctcaccatcagcagtctgcaacctgaagattttgctacgtactactgtcaacagtatcatgattttcctcttacgttcggccaagggaccaaggtggaaatcaaacgg

SEQ ID NO: 560 - DNA, 324 bp, Homo sapiens
gacatccagatgacccagtctccatcctccctgtctgcatctgtaggagaccgtgtcaccatcacttgccgggcaagtcagaatattgatcgtgagttacgttggtaccagcagaaaccagggaaagcccctatgttcctgatctatcatgcgtccaggttgctaagtggggtcccatcacgtttcagtggcagtggatttgggacagatttcactctcaccatcagcagtctgcaacctgaagattttgctacgtactactgtcaacagtatcatgattttcctcttacgttcggccaagggaccaaggtggaaatcaaacgg

SEQ ID NO: 561 - DNA, 324 bp, Homo sapiens
gacatccagatgacccagtctccatcctccctgtcagcatctgtaggagaccgtgtcaccatcacttgccgggcaagtcagtcgattggtcgtgagttacgttggtaccagcagaaaccagggaaagcccctatgttcctgatctatcatgcgtccaggttgcaacgtggggtcccatcacgtttcagtggcagtggatctgggacagatttcactctcaccatcagcagtctgcaacctgaagattttgctacgtactactgtcaacagtatcatgattttcctcttacgttcggccaagggaccaaggtggaaatcaaacgg

SEQ ID NO: 562 - DNA, 324 bp, Homo sapiens
gacatccagatgacccagtctccatcctccctgtctgcatctgtaggagaccgtgtcaccatcacttgccgggcaagtcagaatattgatcgtgagttacgttggtaccagcagaaaccagggaaagcccctatgcccctgatctatcatgcgtccaggttgcaaagtggggtcccatcacgtttcagtggcagtggatctgggacagatttcactctcaccatcagcagtctgcaacctgaagattttgctacgtactactgtcaacagtatcatgattttcctcttacgttcggccaagggaccaaggtggaaatcaaacgg

SEQ ID NO: 563 - DNA, 324 bp, Homo sapiens
gacatccagatgacccagtctccatcctccctgtctgcatctgtaggagaccgtgtcaccatcacttgccgggcaagtcagaatattgatcgtgagttacgttggtaccagcagaaaccaggggaagcccctatgttcctgatctatcatgcgtccaggttgcaaagtggagtcccatcacgtttcagtggcagtggatctgggacagatttcactctcaccatcagcagtctgcaacctgaagattttgctacgtactactgtcaacagtatcatgattttcctcttacgttcggccaagggaccaaggtggaaatcaaacgg

SEQ ID NO: 564 - DNA, 324 bp, Homo sapiens
gacatccagatgacccagtctccatcctccctgtctgcatctgtaggagaccgtgtcaccatcacttgccgggcaagtcagaatattgatcgtgagttacgttggtaccagcagaaaccagggaaagcccctatgttcctgatctatcatgcgtccaggttgcaacgtggggtcccatcacgtttcagtggcagtggatctgggacagatttcactctcaccatcagcagtctgcaacctgaagattttgctacgtactactgtcaacagtatcatgattttcctcttacgttcggccaagggaccaaggtggaaaacaaacgg

SEQ ID NO: 565 - DNA, 324 bp, Homo sapiens
gagatcaagatgacccagtctccatcctccctgtctgcatctgtaggagaccgtgtcaccatcacttgccgggcaagtaagaatattgatcgtgagttacgttggtaccagcagaaaccagggaaagcccctatgttcctgatctatcatgcgtccaggttgctgaagggggtcccatcacgtttcagtggcagtggatctgggacagatttcactctcaccatcagcagtctgcaacctgaagattttgctacatactactgtcaacagtatcatgattttcctcttacgttcggccaagggaccaaggtggaaatcaaacgg

SEQ ID NO: 566 - DNA, 324 bp, Homo sapiens
ccgatcgtgatgacccagtctccatcctccctgtctgcatctgtaggagaccgtgtcaccatcacttgccgggcaagtagtagtattgatcgtgagttacgttggtaccagcagaaaccagggaaagcccctatgttcctgatctatcatgcgtccaggttgatgaagggggtcccatcacgtttcagtggcagtggatctgggacagatttcactctcaccatcagcagtctgcaacctgaagattttgctacgtactactgtcaacagtatcatgattttcctcttacgttcggccaagggaccaaggtggaaatcaaacgg

SEQ ID NO: 567 - DNA, 324 bp, Homo sapiens
gacatccagatgacccagtctccatcctccctgtctgcatctgtaggagaccgtgtcaccatcacttgccgggcaagtaataatattgatcgtgagttacgttggtaccagcagaaaccagggaaagcccctatgttcctgatctatcatgcgtccaggttgatgaagggtgtcccatcacgtttcagtggcagtggatctgggacagatttcactctcaccatcagcagtctgcaacctgaagattttgctacgtactactgtcaacagtatcatgattttcctcttacgttcggccaagggaccaaggtggaaatcaaacgg

SEQ ID NO: 568 - DNA, 324 bp, Homo sapiens
gacatccagatgactcagtctccatcctctctgtctgcatctgtaggagaccgtgtcaccatcacttgccgggcaagtcagaatattgatcgtgagttacgttggtaccagcagaaaccagggaaagcccctatgttcctgatctatcatgcgtccaggttgctacgtggggtcccatcacgtttcagtggcagtggatctgggacagatttcactctcaccatcagcagtctgcaacctgaagattttgctacgtactactgtcaacagtatcatgattttcctcttacgttcggccaagggaccaaggtggaaatcaaacgg

SEQ ID NO: 569 - DNA, 324 bp, Homo sapiens
gacatccagatgacccagtctccatcctccctgtctgcatctgtaggagaccgtgtcaccatcacttgccgggcaagtcagaatattgatcgtgagttacgttggtaccagcagaaaccagggaaagcccctatgttcctgatctatcatgcgtccaggttgcgacgtggggtcccatcacgtttcagtggcagtggatctgggacagatttcactctcaccatcagcagtctgcaacctgaagattttgctacgtactactgtcaacagtatcatgatttccctcttacgttcggccaagggaccaaggtggaaatcaaacgg

SEQ ID NO: 570 - DNA, 324 bp, Homo sapiens
gacatccagatgacccagtctccatcctccctgtctgcatctgtaggagaccgtgtcaccatcacttgccgggcaagtcagaatattgatcgtgagttacgttggtaccagcagaaaccagggaaagcccctatgttcctgatctatcatgcgtccaggttgcaacgtggggtcccatcacgtttcagtggcagtggatctgggacagatttcactctcaccatcagcagtctgcaacctgaggattttgctacgtactactgtcaacagtatcatgattttcctcttacgatcggccaagggaccaaggtggaaatcaaacgg

SEQ ID NO: 571 - DNA, 324 bp, Homo sapiens
gacatccagatgacccagtctccatcctccctgtctgcatctgtaggagaccgtgtcaccatcacttgccgggcaagtcagaatattgatcgtgagttacgttggtaccagcagaaaccagggaaagaccctatgttcctgatctatcatgcgtccaggttgcaacgtggggtcccatcacgtttcagtggcagtggatctgggacagatttcactctcaccatcagcagtctgcaacctgaagattttgctacgtactactgtcaacagtatcatgattttcctcttacgttcggccaagggaccaaggtggaaatcaaacgg

SEQ ID NO: 572 - DNA, 324 bp, Homo sapiens
aatatcgatatgacccagtctccatcctccctgtctgcatctgtaggagaccgtgtcaccatcacttgccgggcaagtcagaatattgatcgtgagttacgttggtaccagcagaaaccagggaaagcccctatgttcctgatctatcatgcgtccaggttgtataggggggtcccatcacgtttcagtggcagtggatctgggacagatttcactctcaccatcagcagtctgcaacctgaagattttgctacgtactactgtcaacagtatcatgattttcctcttacgttcggccaagggaccaaggtggaaatcaaacgg

SEQ ID NO: 573 - DNA, 324 bp, Homo sapiens
catatctctatgacccagtctccatcctccctgtctgcatctgtaggagaccgtgtcaccatcacttgccgggcaagtagtaatattgatcgtgagttacgttggtaccagcagaaaccagggaaagcccctatgttcctgatctatcatgcgtccaggttgattaagggggtcccatcacgtttcagtggcagtggatctgggacagatttcactctcaccatcagcagtctgcaacctgaagattttgctacgtactactgtcaacagtatcatgattttcctcttacgttcggccaagggaccaaggtggaaatcaaacgg

SEQ ID NO: 574 - DNA, 324 bp, Homo sapiens
gagatcaggatgacccagtctccatcctccctgtctgcatctgtaggagaccgtgtcaccatcacttgccgggcaagtaataatattgatcgtgagttacgttggtaccagcagaaaccagggaaagcccctatgttcctgatctatcatgcgtccaggttgtataagggggtcccatcacgtttcagtggcggtggatctgggacagatttcactctcaccatcagcagtctgcaacctgaagattttgctacgtactactgtcaacagtatcatgattttcctcttacgttcggccaagggaccaaggtggaaatcaaacgg

SEQ ID NO: 575 - DNA, 324 bp, Homo sapiens
aggatcgtgatgacccagtctccatcctccctgtctgcatctgtaggagaccgtgtcaccatcacttgccgggcaagtaataatattgatcgtgagttacgttggtaccaacagaaaccagggaaagcccctatgttcctgatctatcatgcgtccaggttgattaagggggtcccatcacgtttcagtggcagtggatctgggacagatttcactctcaccatcagcagtctgcaacctgaagattttgctacgtactactgtcaacagtatcatgattttcctcttacgttcggccaagggaccaaggtggaaatcaaacgg

SEQ ID NO: 576 - DNA, 324 bp, Homo sapiens
cctatccggatgacccagtctccatcctccctgtctgcatctgtaggagaccgtgtcaccatcacttgccgggcaagtgctaatattgatcgtgagttacgttggtaccagcagaaaccagggaaagcccctatgttcctgatctatcatgcgtccaggttgattaagggggtcccatcacgtttcagtggcagtggatctgggacagatttcactctcaccatcagcagtctgcaacctgaagattttgctacgtactactgtcaacagtatcatgattttcctcttacgttcggccaagggaccaaggtggaaatcaaacgg

SEQ ID NO: 577 - DNA, 324 bp, Homo sapiens
acgatctctatgacccagtctccatcctccctgtctgcatctgtaggagaccgtgtcaccatcacttgccgggcaagtagtaatattgatcgtgagttacgttggtaccagcagaaaccagggaaagcccctatgttcctgatctatcatgcgtccaggttgtataggggggccccatcacgtttcagtggcagtggatctgggacagatttcactctcaccatcagcagtctgcaacctgaagattttgctacgtactactgtcaacagtatcatgattttcctcttacgttcggccaagggaccaaggtggaaatcaaacgg

SEQ ID NO: 578 - DNA, 324 bp, Homo sapiens
cgtatccttatgacccagtctccatcctccctgtctgcatctgtaggagaccgtgtcaccatcacttgccgggcaagtcttaatattgatcgtgagttacgttggttccagcagaaaccagggaaagcccctatgttcctgatctatcatgcgtccaggttgcataagggggtcccatcacgtttcagtggcagtggatctgggacagatttcactctcaccatcagcagtctgcaacctgaagattttgctacgtactactgtcaacagtatcatgattttcctcttacgttcggccaagggaccaaggtggaaatcaaacgg

SEQ ID NO: 579 - DNA, 324 bp, Homo sapiens
gggatcgtgatgacccagtctccatcctccctgtctgcatctgtaggagaccgtgtcaccatcacttgccgggcaagtattaatattgatcgtgagttacgttggtaccagcagaaaccagggaaagcccctatgttcctgatctatcatgcgtccaggttgcataagggggccccatcacgtttcagtggcagtggatctgggacagatttcactctcaccatcagcagtctgcaacctgaagattttgctacgtactactgtcaacagtatcatgattttcctcttacgttcggccaagggaccaaggtggaaatcaaacgg

SEQ ID NO: 580 - DNA, 324 bp, Homo sapiens
agtatcgttatgacccagtctccatcctccctgtctgcatctgtaggagaccgtgtcaccatcacttgccgggcaagtcagaatattgatcgtgagttacgttggtaccagcagaaaccagggaaagcccctatgttcctgatctatcatgcgtccaggttgcataagggggtcccatcacgtttcagtggcagtggatctgggacagatttcactctcaccatcagcagtctgcaacctgaagattttgctacgtactactgtcaacagtatcatgattttcctcttacgttcggccaagggaccaaggtggaaatcaaacgg

SEQ ID NO: 581 - DNA, 324 bp, Homo sapiens
gatatcctgatgacccagtctccatcctccctgtctgcatctgtaggagaccgtgtcaccatcacttgccgggcaagtactaatattgatcgtgagttacgttggtaccagcagaaaccagggaaagcccctatgttcctgatctatcatgcgtccaggttgtataagggggtcccatcacgtttcagtggcagtggatctgggacagatttcactctcaccatcagcagtctgcaacctgaagattttgctacgtactactgtcaacagtatcatgattttcctcttacgttaggccaagggaccaaggtggaaatcaaacgg

SEQ ID NO: 582 - DNA, 324 bp, Homo sapiens
cagatcaatatgacccagtctccatcctccctgtctgcatctgtaggagaccgtgtcaccatcacttgccgggcaagtagtaatattgatcgtgagttacgttggtaccagcagaaaccagggaaagcccctatgttcctgatctatcatgcgtccaggttgattaagggggtcccatcacgtttcagtggcagtggatctgggacagatttcactctcaccatcagcagtctgcaacctgaagattttgctacgtactactgtcaacagtatcatgattttcctcttacgttcggccaagggaccaaggtggaaatcaaacgg

SEQ ID NO: 583 - DNA, 324 bp, Homo sapiens
acgatccagatgacccagtctccatcctccctgtctgcatctgtaggagaccgtgtcaccatcacttgccgggcaagtgagaatattgatcgtgagttacgttggtaccagcagaaaccagggaaagcccctatgttcctgatctatcatgcgtccaggttgattaagggggtcccatcacgtttcagtggcagtggatctgggacagatttcactctcaccatcagcagtctgcaacctgaagattttgctacgtactactgtcaacagtatcatgattttcctcttacgttcggccaagggaccaaggtggaaatcaaacgg

SEQ ID NO: 584 - DNA, 324 bp, Homo sapiens
cagatccttatgacccagtctccatcctccctgtctgcatctgtaggagaccgtgtcaccatcacttgccgggcaagtagtaatattgatcgtgagttacgttggtaccagcagaaaccagggaaagcccctatgttcctgatctatcatgcgtccaggttgatgaagggggtcccatcacgtttcagtggcagtggatctgggacagatttcactctcaccatcagcagtctgcaacctgaagattttgctacgtactactgtcaacagtatcatgattttcctcttacgttcggccaagggaccaaggtggaaatcaaacgg

SEQ ID NO: 585 - DNA, 324 bp, Homo sapiens
cagatcgttatgacccagtctccatcctccctgtctgcatctgtaggagaccgtgtcaccatcacttgccgggcaagtggtaatattgatcgtgagttacgttggtaccagcagaaaccagggaaagcccctatgttcctgatctatcatgcgtccaggttgtataagggggtcccatcacgtttcagtggcagtggatctgggacagatttcactctcaccatcagcagtctgcaacctgaagattttgctacgtactactgtcaacagtatcatgattttcctcttacgttcggccaagggaccaaggtggaaatcaaacgg

SEQ ID NO: 586 - DNA, 324 bp, Homo sapiens
gatatcttgatgacccagtctccatcctccctgtctgcatctgtaggagaccgtgtcaccatcacttgccgggcaagttctaatattgatcgtgagttacgttggtaccagcagaaaccagggaaagcccctatgttcctgatctatcatgcgtccaggttgatgaagggggtcccatcacgtttcagtggcagtggatctgggacagatttcactctcaccatcagcagtctgcaacctgaagattttgctacgtactactgtcaacagtatcatgattttcctcttacgttcggccaagggaccaaggtggaaatcaaacgg

SEQ ID NO: 587 - DNA, 324 bp, Homo sapiens
ggtatcgagatgacccagtctccatcctccctgtctgcatctgtaggagaccgtgtcaccatcacttgccgggcaagtaataatattgatcgtgagttacgttggtaccagcagaaaccagggaaagcccctatgttcctgatctatcatgcgtccaggttgcataggggggtcccatcacgtttcagtggcagtggatctgggacagatttcactctcaccatcagcagtctgcaacctgaagattttgctacgtactactgtcaacagtatcatgattttcctcttacgttcggccaagggaccaaggtggaaatcaaacgg

SEQ ID NO: 588 - DNA, 324 bp, Homo sapiens
gggatcgttatgacccagtctccatcctccctgtctgcatctgtaggagaccgtgtcaccatcacttgccgggcaagtaataatattgatcgtgagttacgttggtaccagcagaaaccagggaaagcccctatgttcctgatctatcatgcgtccaggttgtataagggagtcccatcacgtttcagtggcagtggatctgggacagatttcactctcaccatcagcagtctgcaacctgaagattttgctacgtactactgtcaacagtatcatgattttcctcttacgttcggccaagggaccaaggtggaaatcaaacgg

SEQ ID NO: 589 - DNA, 324 bp, Homo sapiens
ccgatcaagatgacccagtctccatcctccctgtctgcatctgtaggagaccgtgtcaccatcacttgccgggcaagtaggaatattgatcgtgagttacgttggtaccagcagaaaccagggaaagcccctatgttcctgatctatcatgcgtccaggttgatgcatggagtcccatcacgtttcagtggcagtggatctgggacagatttcactctcaccatcagcagtctgcaacctgaagattttgctacgtactactgtcaacagtatcatgattttcctcttacgttcggccaagggaccaaggtggaaatcaaacgg

SEQ ID NO: 590 - DNA, 324 bp, Homo sapiens
aatatcgttatgacccagtctccatcctccctgtctgcatctgtaggagaccgtgtcaccatcacttgccgggcaagtcagaatattgatcgtgagttacgttggtaccagcagaaaccagggaaagcccctatgttcctgatctatcatgcgtccaggttgtataagggggtcccatcacgtttcagtggcagtggatctgggacagatttcactctcaccatcagcagtctgcaacctgaagattttgctacgtactactgtcaacagtatcatgattttcctcttacgttcggccaagggaccaaggtggaaatcaaacgg

SEQ ID NO: 591 - DNA, 324 bp, Homo sapiens
gacatccagatgacccagtctccatcctccctgtctgcatctgtaggagaccgtgtcaccatcacttgccgggcaagtcaggatatttatctgaatttaaattggtatcagcagaaaccagggaaagcccctaagctcctgatctatggtacgtccaatttgcaaagtggggtcccatcacgtttcagtggcagtggatctgggacagatttcactctcaccatcagcagtctgcaacctgaagattttgctacgtactactgtcaaccgtcttttctttatccttatacgttcggccaagggaccaaggtggaaatcagacgg

SEQ ID NO: 592 - DNA, 324 bp, Homo sapiens
gacatccagatgacccagtctccatcctccctgtctgcatctgtaggagaccgtgtcaccatcacttgccgggcaagtcaggatatttatctgaatttaaattggtatcagcagaaaccagggaaagcccctaagctcctgatctatggtacgtccaatttgcaaagtggggtcccatcacgtttcagtggcagtggatctgggacagatttcactctcaccatcagcagtctgcaacctgaagattttgctacgtactactgtcaaccgtctttttacttcccttatacgttcggccaagggaccaaggtggaaatcagacgg

SEQ ID NO: 593 - DNA, 324 bp, Homo sapiens
gacatccagatgacccagtctccatcctccctgtctgcatctgtaggagaccgtgtcaccatcacttgccgggcaagtcaggatatttacctgaatttagactggtatcagcagaaaccaggaaaagcccctaagctcctgatctatggtacgtccaatttgcaaagtggggtcccatcacgtttcagtggcagtggatctgggacagatttcactctcaccatcagcagtctgcaacctgaagattttgctacgtactactgtcaaccgtcttttttcttcccttatacgttcggccaagggaccaaggtggaaatcagacgg

SEQ ID NO: 594 - DNA, 324 bp, Homo sapiens
gacatccagatgacccagtctccatcctccctgtctgcatctgtaggagaccgtgtcaccatcacttgccgggcaagtcaggatatttacctgaatttagactggtatcagcagaaaccagggaaagcccctaagctcctgatctatggtacgtccaatttgcaaagtggggtcccatcacgtttcagtggcagtggatctgggacagatttcactctcaccatcagcagtctgcaacctgaagatttcgctacgtactactgtcaaccgtctttttacttcccttatacgttcggccaagggaccaaggtggaaatcagacgg

SEQ ID NO: 595 - DNA, 324 bp, Homo sapiens
gacatccagatgacccagtctccatcctccctgtctgcatctgtaggagaccgtgtcaccatcacttgccgggcaagtcaggatatttacctgaatttagactggtatcagcagaaaccagggaaagcccctaagctcctgatctatggtacgtccaatttgcaaagtggggtcccatcacgtttcagtggcagtggatctgggacagatttcactctcaccatcagcagtctgcaacctgaagattttgctacgtactactgtcaaccgtcttttttccacccttatacgttcggccaagggaccaaggtggaaatcagacgg

SEQ ID NO: 596 - DNA, 324 bp, Homo sapiens
gacatccagatgacccagtctccatcctccctgtctgcatctgtaggagaccgtgtcaccatcacttgccgggcaagtcaggatattttcctgaatttagagtggtatcagcagaaaccagggaaagcccctaagctcctgatctatggtacgtccaatttgcaaagtggggtcccatcacgtttcagtggcagtggatctgggacagatttcactctcaccatcagcagtctgcaacctgaagattttgctacgtactactgtcaaccgtctttttacttcccttatacgttcggccaagggaccaaggtggaaatcagacgg

SEQ ID NO: 597 - DNA, 324 bp, Homo sapiens
gacatccagatgacccagtctccatcctccctgtctgcatctgtaggagaccgtgtcaccatcacttgccgggcaagtcaggatatttacctgaatttagactggtatcagcagaaaccagggaaagcccctaagctcctgatctatggtacgtccaatttgcaaagtggggtcccatcacgtttcagtggcagtggatctgggacagatttcactctcaccatcagcagtctgcaacctgaagattttgctacgtactactgtcaaccgtcttttctgttcccttatacgttcggccaagggaccaaggtggaaatcagacgg

SEQ ID NO: 598 - DNA, 324 bp, Homo sapiens
gacatccagatgacccagtctccatcctccctgtctgcatctgtaggagaccgtgtcaccatcacttgccgggcaagtcaggatatttacctgaatttagactggtatcagcagaaaccaggggaagcccctaagctcctgatctatggtacgtccaatttgcaaagtggggtcccatcacgtttcagtggcagtggatctgggacagatttcactctcaccatcagcagtctgcaacctgaagattttgctacgtactactgtcaaccgtcttttttgtacccttatacgttcggccaagggaccaaggtggaaatcagacgg

SEQ ID NO: 599 - DNA, 324 bp, Homo sapiens
gacatccagatgacccagtctccatcctccctgtctgcatctgtaggagaccgtgtcaccatcacttgccgggcaagtcaggatatttacctgaatttagactggtatcagcagaaaccagggaaagcccctaagctcctgatctatggtacgtccaatttgcaaagtggggtcccatcacgtttcagtggcagtggatctgggacagatttcactctcaccatcggcagtctgcaacctgaagattttgctacgtactactgtcaaccgtcttttttgtacccttatacgttcggccaagggaccaaggtggaaatcagacgg

SEQ ID NO: 600 - DNA, 324 bp, Homo sapiens
gacatccagatgacccagtctccatcctccctgtctgcatctgtaggagaccgtgtcaccatcacttgccgggcaagtcaggatatttacctgaatttagactggtatcagcagaaaccagggaaagcccctaggctcctgatctatggtacgtccaatttgcaaagtggggtcccatcacgtttcagtggcagtggatctgggacagatttcactctcaccatcagcagtctgcaacctgaagattttgctacgtactactgtcaaccgtcttttctctacccttatacgttcggccaagggaccaaggtggaaatcagacgg

SEQ ID NO: 601 - DNA, 324 bp, Homo sapiens
gacatccagatgacccagtctccaccctccctgtctgcatctgtaggagaccgcgtcaccatcacttgccgggcaagtcaggatatttacctgaatttaaactggtatcagcagaaaccagggaaagcccctaagctcctgatctatggtacgtccaatttgcaaagtggggtcccatcacgtttcagtggcagtggatctgggacagatttcactctcaccatcagcagtctgcaacctgaagattttgctacgtactactgtcagccgtctttttacttgccttatacgttcggccaagggaccaaggtggaaatcagacgg

SEQ ID NO: 602 - DNA, 324 bp, Homo sapiens
gacatccaggtgacccagtctccatcctccctgtctgcatctgtaggagaccgtgtcaccatcacttgccgggcaagtcaggatatttacctgaatttaaactggtatcagcagaaaccagggaaagcccctaagctcctgatctatggtacgtccaatttgcaaagtggggtcccatcacgtttcagtggcagtggatctgggacagatttcactctcaccatcagcagtctgcaacctgaagattttgctacgtactactgtcaaccgtctttttacttcccttatacgttcggccaagggaccaaggtggaaatcagacgg

SEQ ID NO: 603 - DNA, 324 bp, Homo sapiens
gacatccagatgacccagtctccatcctccctgtctgcatctgtaggagaccgtgtcaccatcacttgccgggcaagtcaggatatttacctgaatttaaactggtatcagcagaaaccagggaaagcccctaagctcctgatctatggtacgtccgatttgcaaagtggggtcccatcacgtttcagtggcagtggatctgggacagatttcactctcaccatcagcagtctgcaacctgaagattttgctacgtactactgtcaaccgtctttttggatgccttatacgttcggccaagggaccaaggtggaaatcagacgg

SEQ ID NO: 604 - DNA, 324 bp, Homo sapiens
gacatccagatgacccagtctccatcctccctgtctgcatctgtaggagaccgtgtcaccatcacttgccgggcaagtcaggatatttacctgaatttaaactggtatcagcagaaaccagggaaagcccctaagctcctgatctatggtacgtccaacttgcaaagtggggtcccatcacgtttcggtggcagtggatctgggacagatttcactctcaccatcagcagtctgcaacctgaagattttgctacgtactactgtcaaccgtctttttaccacccttatacgttcggccaagggaccaaggtggaaatcagacgg

SEQ ID NO: 605 - DNA, 324 bp, Homo sapiens
gacatccagatgacccagtctccatcctccctgtctgcatctgtaggagaccgtgtcaccatcacttgccgggcaagtcaggatatttacctgaatttagactggtatcagcagaaaccagggaaagcccctaagctcctgatctatggtacgtccaatttgcaaagtggggtcccatcacgtttcagtggcagtggatctgggacagatttcactctcaccatcagcagtctgcaacctgaagattttgctacgtactactgtcagccgtctttttactacccttatacgttcggccaagggaccaaggtggaaatcagacgg

SEQ ID NO: 606 - DNA, 324 bp, Homo sapiens
gacatccagatgacccagtctccatcctccctgtctgcatctgtaggagaccgtgtcaccatcacttgccgggcaagtcaggatatttggctgaatttagactggtatcagcagaaaccaggggaagcccctaagctcctgatctatggtacgtccaatttgcaaagtggggtcccatcacgtttcagtggcagtggatctgggacagatttcactctcaccatcagcagtctgcaacctgaagattttgctacgtactactgtcaaccgtctttttacttcccttatacgttcggccaagggaccaaggtggaaatcagacgg

SEQ ID NO: 607 - DNA, 324 bp, Homo sapiens
gacatccagatgacccagtctccatcctccctgtctgcatctgtaggagaccgtgtcaccatcacttgccgggcaagtcaggatatttacctgaatttagactggtatcagcagaaaccaggggaagcccctaagctcctgatctatggtacgtccaatttgcaaagtggggtcccatcacgtttcagtggcagtggatctgggacagatttcactctcaccatcagcagtctgcaacctgaagatcttgctacgtactactgtcaaccgtctttttacttcccttatacgttcggccaagggaccaaggtggaaatcagacgg

SEQ ID NO: 608 - DNA, 324 bp, Homo sapiens
gacatccagatgacccagtctccatcctccctgtctgcatctgtaggagaccgtgtcaccatcacttgccgggcaagtcaggatatttatctgaatttaaattggtatcagcagaaaccagggaaagcccctaagctcctgatctatggtacgtccaatttgcaaagtggggtcccatcacgtttcagtggcagtggatatgggacagatttcactctcaccatcagcagtctgcaacctgaggattttgctacgtactactgtcaaccgtcttttctttatccttatacgttcggccaagggaccaaggtggaaatcagacgg

SEQ ID NO: 609 - DNA, 324 bp, Homo sapiens
gacatccagatgacccagtctccatcctccctgtctgcatctgtaggagaccgtgtcaccatcacttgcctggcaagtcaggatatttatctgaatttaaattggtatcagcagaaaccagggaaagcccctaagctcctgatctatggtacgtccaatttgcaaagtggggtcccatcacgtttcagtggcagtggatatgggacagatttcactcttaccatcagcagtctgcaacctgaagattttgctacgtactactgtcaaccgtcttttctttatccttatacgttcggccaagggaccaaggtggaaatcagacgg

SEQ ID NO: 610 - DNA, 324 bp, Homo sapiens
gacatccagatgacccagtctccatcctccctgtctgcatctgtaggagaccgtgtcaccatcacttgccgggcaagtcaggatatttatctgaatttaaattggtatcagcagaaaccagggaaagcccctaagctcctgatctatggtacgtccgatttgcaaagtggggtcccatcacgtttcagtggcagtggatctgggacagatttcactctcaccatcagcagtctgcaacctgaagattttgctacgtactactgtcaaccgtcttttctttatccttatacgttcggccaagggaccaaggtggaaatcagacgg

SEQ ID NO: 611 - DNA, 324 bp, Homo sapiens
gacatccagatgacccagtctccatcctccctgtctgcatctgtaggagaccgtgtcaccatcacttgccgggcaagtcaggatatttggctgaatttagactggtatcagcagaaaccagggaaagcccctaagctcctgatctatggtacgtccgatttgcaaagtggggtcccatcacgtttcagcggcagtggatctgggacagatttcactctcaccatcagcagtctgcaacctgaagattttgctacgtactactgtcaaccgtcttttatgttcccttatacgttcggccaagggaccaaggtggaaatcagacgg

SEQ ID NO: 612 - DNA, 324 bp, Homo sapiens
gacatccagatgacccagtctccatcctccctgtctgcatctgtaggagaccgtgtcaccatcacttgccgggcaagtcaggatatttatctgaatttaaattggtatcagcagaaaccagggaaagcccctaagctcctgatctatggtacgtccaatttgcaaagtggggtcccatcacgtttcagtggcagtggatatgggacagatttcactctcaccatcagcagtctgcaacctgaagattttgctacgtactactgtcaaccgtcttttctttatccttatacgttcggccaagggaccaaggtggaaaacagacgg

SEQ ID NO: 613 - DNA, 324 bp, Homo sapiens
gacatccagatgacccagtctccatcctccctgtctgcatctgtaggagaccgtgtcatcatcacttgccgggcaagtcaggatatttacctgaatttaaactggtatcagcagaaaccagggaaagcccctaagctcctgatctatggtacgtccaatttgcaaagtggggtcccatcacgtttcagtggcagtggatctgggacagatttcactctcaccatcagcagtctgcaacctgaagattttgctacgtactactgtcaaccgtcttttgtcttcccttatacgttcggccaagggaccaaggtggaaatcagacgg

SEQ ID NO: 614 - DNA, 324 bp, Homo sapiens
gacatccagatgacccagtctccatcctccctgtctgcatctgtaggagaccgtgtcaccatcacttgccgggcaagtcaggatatttacctgaatttagactggtatcagcagaaaccaggggaagcccctaagctcctgatctatggtacgtccaatttgcaaagtggggtcccatcacgtttcagtggcagtggatctgggacagatttcactctcaccatcagcagtctgcaacctgaagattttgctacgtactactgtcaaccgtcttttttgttcccttatacgttcggccaagggaccaaggtggaaatcagacgg

SEQ ID NO: 615 - DNA, 324 bp, Homo sapiens
gacatccagatgacccagtctccatcctccctgtctgcatctgtaggagaccgtgtcaccatcacttgccgggcaagtcaggatatttatctgaatttaaattggtatcagcagaaaccagggaaagcccctaagctcctgatctatggtacgtccaatttgcaaagtggggtcccatcacgtttcagtggcagtggatatgggacaaatttcactctcaccatcagcagtctgcaacctgaagattttgctacgtactactgtcaaccgtcttttctttatccttatacgttcggccaagggaccaaggtggaaatcagacgg

SEQ ID NO: 616 - DNA, 324 bp, Homo sapiens
gacatccagatgacccagtctccatcctccctgtctgcatctgtaggagaccgtgtcaccatcacttgccgggcaagtcaggatatttacctgaatttaaactggtatcagcagaaaccagagaaagcccctaagctcctgatctatggtacgtccaatttgcaaagtggggtcccatcacgtttcagtggcagtggatctgggacagatttcactctcaccatcagcagtctgcaacctgaagattttgctacgtactactgtcaaccgtcttttctgtacccttatacgttcggccaagggaccaaggtggaaatcagacgg

SEQ ID NO: 617 - DNA, 324 bp, Homo sapiens
gacatccagatgacccagtctccatcctccctgtctgcatctgtaggagaccgtgtcaccatcacttgccgggcaagtcaggatatttatctgaatttaaattggtatcagcagaaaccagggacagcccctaagctcctgatctatggtacgtccaatttgcaaagtggggtcccatcacgtttcagtggcagtggatctgggacagatttcactctcaccatcagcagtctgcaacctgaagattttgctacgtactactgtcaaccgtcttttctttatccttatacgttcggccaagggaccaaggtggaaatcagacgg

SEQ ID NO: 618 - DNA, 324 bp, Homo sapiens
gacatccagatgacccagtctccatcctccctgtttgcatctgtaggagaccgtgtcaccatcacttgccgggcaagtcaggatatttatctgaatttaaattggtatcagcagaaaccagggaaagcccctaagctcctgatccatggtacgtccaatttgcaaagtggggtcccatcacgtttcagtggcagcggatctgggacagatttcactctcaccatcagcagtctgcaacctgaagattttgctacgtactactgtcaaccgtcttttctttatccttatacgttcggccaagggaccaaggtggaaatcaggcgg

SEQ ID NO: 619 - DNA, 324 bp, Homo sapiens
gacatccagatgacccagtctccatcctccctgtctgcatctgtaggagaccgtgtcaccatcacttgccgggcaagtcaggatatttatctgaatttaaattggtatcagcagaaaccagggaaagcccctaagctcctgatctatggtacgtccaacttgcaaagtggggtcccatcacgtttcagtggcagtggatctggggcagatttcactctcaccatcagcagtctgcaacctgaagattttgctacgtactactgtcaaccgtcttttctttatccttatacgttcggccaagggaccaaggtggaaatcagacgg

SEQ ID NO: 620 - DNA, 324 bp, Homo sapiens
gacatccagatgacccagtctccatcctccctgtctgcatctgtaggagaccgtgtcaccatcacttgccgggcaagtcaggatatttacctgaatttagactggtatcagcagaaaccagggaaagcccctaagctcctgatctatggttcgtcctatttgcaaagtggggtcccatcacgtttcagtggcagtggatctgggacagatttcactctcaccatcagcagtctgcaacctgaagatttcgctacgtactactgtcaaccgtctttttacttcccttatacgttcggccaagggaccaaggtggaaatcagacgg

SEQ ID NO: 621 - DNA, 324 bp, Homo sapiens
gacatccagatgacccagtctccatcctccctgtctgcatctgtaggagaccgtgtcaccatcacttgccgggcaagtcaggatatttacctgaatttagactggtaccagcagaaaccagggaaagcccctaagctcctgatccgtggtgtttccgagttgcaaagtggggtcccatcacgtttcagtggcagtggatctgggacagagttcactctcaccatcagcagtctgcaacctgaagatttcgctacgtactactgtcaaccgtctttttacttcccttatacgttcggccaagggaccaaggtggaaatcagacgg

SEQ ID NO: 622 - DNA, 324 bp, Homo sapiens
gacatccagatgacccagtctccatcctccctgtctgcatctgtaggagaccgtgtcaccatcacttgccgggcaagtcaggatatttacctgaatttagactggtaccagcagaaaccagggaaagcccctaagctcctgatctctttggcttccgagttgcaaagtggggtcccatcacgtttcagtggcagtggatctgggacagatttcactctcaccatcagcagtctgcaacctgaagatttcgctacgtactactgtcaaccgtctttttacttcccttatacgttcggccaagggaccaaggtggaaatcagacgg

SEQ ID NO: 623 - DNA, 324 bp, Homo sapiens
gacatccagatgacccagtctccatcctccctgtctgcatctgtaggagaccgtgtcaccatcacttgccgggcaagtcaggatatttacctgaatttagactggtaccagcagaaaccagggaaagcccctaagctcctgatcggtcttacttccgatttgcaaagtggggtcccatcacgtttcagtggcagtggatctgggacagatttcactctcaccatcagcagtctgcaacctgaagatttcgctacgtactactgtcaaccgtctttttacttcccttatacgttcggccaagggaccaaggtggaaatcagacgg

SEQ ID NO: 624 - DNA, 324 bp, Homo sapiens
gacatccagatgacccagtctccatcctccctgtctgcatctgtaggagaccgtgtcaccatcacttgccgggcaagtcaggatatttacctgaatttagactggtatcagcagaaaccagggaaagcccctaagctcctgatctatggtacgtccaatttgcaaagtggggtcccatcacgtttcagtggcagtggatatgggacagatttcactctcaccatcagcagtctgcaacctgaagatttcgctacgtactactgtcaaccgtctttttacttcccttatacgttcggccaagggaccaagctggaaatcagacgg

SEQ ID NO: 625 - DNA, 324 bp, Homo sapiens
gacatccagatgacccaggctccatcctccctgtctgcatctgtaggagaccgtgtcaccatcacttgccgggcaagtcaggatatttacctgaatttagactggtatcagcagacaccagggaatgcccctaagctcctgatctatggtacgtccaatttgcaaagtggggtcccatcacgtttcagtggcagtggatctgggacagatttcactctcaccatcagcagtctgcaacctgaagatttcgctacgtactactgtcaaccgtctttttacttcccttatacgttcggccaagggaccaaggtggaaatcagacgg

SEQ ID NO: 626 - DNA, 324 bp, Homo sapiens
gacatccagatgacccagtctccatcctccctgtctgcatctgtaggagaccgtgtcaccatcacttgccgggcaagtcaggttatttacctgaatttagactggtatcagcagaaaccagggaaagcccctaggctcctgatctatggtacgtccaatttgcaaagtggggtcccatcacgtttcagtggcagtggatctgggacagatttcactctcaccatcagcagtctgcaacctgaagatttcgctacgtactactgtcaaccgtctttttacttcccttatacgttcggccaagggaccaaggtggaaatcagacgg

SEQ ID NO: 627 - DNA, 324 bp, Homo sapiens
gacatccagatgacccagtctccatcctccctgtctgcatctgtaggagaccgtgtcaccatcacttgccgggcaagtcaggatatttacctgaatttagactggtaccagcagaaaccagggaaagcccctaagctcctgatcaggacgtcgtccgatttgcaaagtggggtcccatcacgtttcagtggcagtggatctgggacagatttcactctcaccatcagcagtctgcaacctgaagatttcgctacgtactactgtcaaccgtctttttacttcccttatacgttcggccaagggaccaaggtggaaatcagacgg

SEQ ID NO: 628 - DNA, 324 bp, Homo sapiens
gacatccagatgacccagtctccatcctccctgtctgcatctgtaggagaccgtgtcaccatcacttgccgggcaagtcaggatatttacctgaatttagactggtatcagcagaaaccagggaaagcccctaagctcctgatcactgtgggttccgagttgcaaagtggggtcccatcacgtttcagtggcagtggatctgggacagatttcactctcaccatcagcagtctgcaacctgaagatttcgctacgtactactgtcaaccgtctttttacttcccttatacgttcggccaagggaccaaggtggaaatcagacgg

SEQ ID NO: 629 - DNA, 324 bp, Homo sapiens
gacatccagatgacccagtctccatcctccctgtctgcatctgtaggagaccgtgtcaccatcacttgccgggcaagtcaggatatttacctgaatttagactggtaccagcagaaaccagggaaagcccctaagctcctgatcgctttggtttccgagttgcaaagtggggtcccatcacgtttcagtggcagtggatctgggacagatttcactctcaccatcagcagtctgcaacctgaagatttcgctacgtactactgtcaaccgtctttttacttcccttatacgttcggccaagggaccaaggtggaaatcagacgg

SEQ ID NO: 630 - DNA, 324 bp, Homo sapiens
gacatccagatgacccagtctccatcctccctgtctgcatctgtaggagaccgtgtcaccatcacttgccgggcaagtcaggatatttacctgaatttagactggtaccagcagaaaccagggaaagcccctaagctcctgatccatcattgttccgagttgcaaagtggggtcccatcacgtttcagtggcagtggatctgggacagatttcactctcaccatcagcagtctgcaacctgaagatttcgctacgtactactgtcaaccgtctttttacttcccttatacgttcggccaagggaccaaggtggaaatcagacgg

SEQ ID NO: 631 - DNA, 324 bp, Homo sapiens
gacatccagatgacccagtctccatcctccctgtctgcatctgtaggagaccgtgtcaccatcacttgccgggcaagtcaggatatttacctgaatttagactggtaccagcagaaaccagggaaagcctctaagctcctgatctcgagtagttccgatttgcaaagtggggtcccatcacgtttcagtggcagtggatctgggacagatttcactctcaccatcagcagtctgcaacctgaagatttcgctacgtactactgtcaaccgtctttttacttcccttatacgttcggccaagggaccaaggtggaaatcagacgg

SEQ ID NO: 632 - DNA, 324 bp, Homo sapiens
gacatccagatgacccagtctccatcctccctgtctgcatctgtaggagaccgtgtcaccatcacttgccgggcaagtcaggatatttacctgaatttagactggtaccagcagaaaccagggaaagcccctaagctcctgatctctttggtttccgatttgcaaagtggggtcccatcacgtttcagtggcagtggatctgggacagatttcactctcaccatcagcagtctgcaacctgaagatttcgctacgtactactgtcaaccgtctttttacttcccttatacgttcggccaagggaccaaggtggaaatcagacgg

SEQ ID NO: 633 - DNA, 324 bp, Homo sapiens
gacatccagatgacccagtctccaccctccctgtctgcatctgtaggagaccgtgtcaccatcacttgccgggcaagtcaggatatttacctgaatttagactggtatcagcagaaaccagggaaagcccctaagctcctgatctctctttcgtccgatttgcaaagtggggtcccatcacgtttcagtggcagtggatctgggacagatttcactctcaccatcagcagtctgcaacctgaagatttcgctacgtactactgtcaaccgtctttttacttcccttatgcgttcggccaagggaccaaggtggaaatcagacgg

SEQ ID NO: 634 - DNA, 324 bp, Homo sapiens
gacatccagatgacccagtctccatcctccctgtctgcatctgtaggagaccgtgtcaccatcacttgccgggcaagtcaggatatttacctgaatttagactggtatcagcagaaaccagggaaagcccctaagctcctgatcctttattcgtccgagttgcaaagtggggtcccatcacgtttcagtggcagtggatctgggacagatttcactctcaccatcagcagtctgcaacctgaagatttcgctacgtactactgtcaaccgtctttttacttcccttatacgttcggccaagggaccaaggtggaaatcagacgg

SEQ ID NO: 635 - DNA, 324 bp, Homo sapiens
gacatccagatgacccagtctccatcctccctgtctgcatctgtaggagaccgtgtcaccatcacttgccgggcaagtcaggatatttacctgaatttagactggtaccagcagaaaccagggaaagcccctaagctcctgatctcgtggtcttcctttttgcaaagtggggtcccatcacgtttcagtggcagtggatctgggacagatttcactctcaccatcagcagtctgcaacctgaagatttcgctacgtactactgtcaaccgtctttttacttcccttatacgttcggccaagggaccaaggtggaaatcagacgg

SEQ ID NO: 636 - DNA, 324 bp, Homo sapiens
gacatccagatgacccagtctccatcctccctgtctgcatctgtaggagaccgtgtcaccatcacttgccgggcaagtcaggatatttacctgaatttagactggtatcagcagaaaccaggggaagcccctaagctcctgatctatggtacgtccgatttgcaaagtggggtcccatcacgtttcagtggcagtggatctgggacagatttcactctcaccatcagcagtctgcaacctgaagatttcgctacgtactactgtcaaccgtctttttacttcccttatacgttcggccaagggaccaaggtggaaatcagacgg

SEQ ID NO: 637 - DNA, 324 bp, Homo sapiens
gacatccagatgacccagtctccatcctccctgtctgcatctgtaggagaccgtgtcaccatcacttgccgggcaagtcaggatatttacctgaatttagactggtatcagcagaaaccagggaaagcccctaagctcctgatctatggtacgtccgatttgcaaagtggggtcccatcacgtttcagtggcagtggatatgggacagatttcactctcaccatcagcagtctgcaacctgaagatttcgctacgtactactgtcaaccgtctttttacttcccttatacgttcggccaagggaccaaggtggaaatcagacgg

SEQ ID NO: 638 - DNA, 324 bp, Homo sapiens
gacatccagatgacccagtctccatcctccctgtctgcatctgtaggagaccgtgtcaccatcacttgccgggcaagtcaggatatttacctgaatttagactggtatcagcagaaaccaggggaagcccctaagctcctgatcaattttggttccgagttgcaaagtggtgtcccatcacgtttcagtggcagtggatctgggacagatttcactctcaccatcagcagtctgcaacctgaagatttcgctacgtactactgtcaaccgtctttttacttcccttatacgttcggccaagggaccaaggtggaaatcagacgg

SEQ ID NO: 639 - DNA, 324 bp, Homo sapiens
gacatccagatgacccagtctccatcctccctgtctgcatctgtaggagaccgtgtcaccatcacttgccgggcaagtcaggatatttacctgaatttagactggtatcagcagaaaccagggaaagcccctaagctcctgatctactttggttccgagttgcaaagtggtgtcccatcacgtttcagtggcagtggatctgggacagatttcactctcaccatcagcagtctgcaacctgaagatttcgctacgtactactgtcaaccgtctttttacttcccttatacgttcggccaagggaccaaggtggaaatcagacgg

SEQ ID NO: 640 - DNA, 324 bp, Homo sapiens; identical to SEQ ID NO: 356

SEQ ID NO: 641 - DNA, 324 bp, Homo sapiens
gacatccagatgacccagtctccatcctccctgtctgcatctgtaggagaccgtgtcaccatcacttgccgggcaagtcagctgatttacctgaatttagactggtatcagcagaaaccagggaaagcccctaagctcctgatcaattttggttccgagttgcaaagtggtgtcccatcacgtttcagtggcagtggatatgggacagatttcactctcaccatcagcagtctgcaacctgaagatttcgctacgtactactgtcaaccgtctttttacttcccttatacgttcggccaagggaccaaggtggaaatcaaacgg

SEQ ID NO: 642 - DNA, 324 bp, Homo sapiens
gacatccagatgacccagtctccatcctccctgtctgcatctgtaggagaccgtgtcaccatcacttgccgggcaagtcagcggatttacctgaatttagactggtaccagcagaaaccagggaaagcccctaagctcctgatcaattttggttccgagttgcaaagtggtgtcccatcacgtttcagtggcagtggatatgggacagatttcactctcaccatcagcagtctgcaacctgaagatttcgctacgtactactgtcaaccgtctttttacttcccttatacgttcggccaagggaccaaggtggaaatcaaacgg

SEQ ID NO: 643 - DNA, 324 bp, Homo sapiens
gacatccagatgacccagtctccatcctccctgtctgcatctgtaggagaccgtgtcaccatcacttgccgggcaagtcaggcgatttacctgaatttagactggtatcagcagaaaccagggaaagcccctaagctcctgatcaattttggttccgagttgcaaagtggtgtcccatcacgtttcagtggcagtggatatgggacagatttcactctcaccatcagcagtctgcaacctgaagatttcgctacgtactactgtcaaccgtctttttacttcccttatacgttcggccaagggaccaaggtggaaatcaaacgg

SEQ ID NO: 644 - DNA, 324 bp, Homo sapiens
gacatccagatgacccagtctccatcctccctgtctgcatctgtaggagaccgtgtcaccatcacttgccgggcaagtcagcagatttacctgaatttagactggtaccagcagaaaccagggaaagcccctaagctcctgatcaattttggttccgagttgcaaagtggtgtcccatcacgtttcagtggcagtggatatgggacagatttcactctcaccatcagcagtctgcaacctgaagatttcgctacgtactactgtcaaccgtctttttacttcccttatacgttcggccaagggaccaaggtggaaatcaaacgg

SEQ ID NO: 645 - DNA, 324 bp, Homo sapiens
gacatccagatgacccagtctccatcctccctgtctgcatctgtaggagaccgtgtcaccatcacttgccgggcaagtcagacgatttacctgaatttagactggtatcagcagaaaccagggaaagcccctaagctcctgatcaattttggttccgagttgcaaagtggtgtcccatcacgtttcagtggcagtggatatgggacagatttcactctcaccatcagcagtctgcaacctgaagatttcgctacgtactactgtcaaccgtctttttacttcccttatacgttcggccaagggaccaaggtggaaatcaaacgg

SEQ ID NO: 646 - DNA, 324 bp, Homo sapiens
gacatccagatgacccagtctccatcctccctgtctgcatctgtaggagaccgtgtcaccatcacttgccgggcaagtcagagtatttacctgaatttagactggtatcagcagaaaccagggaaagcccctacgctcctgatcaattttggttccgagttgcaaagtggtgtcccatcacgtttcagtggcagtggatatgggacagatttcactctcaccatcagcagtctgcaacctgaagatttcgctacgtactactgtcaaccgtctttttacttcccttatacgttcggccaagggaccaaggtggaaatcaaacgg

SEQ ID NO: 647 - DNA, 324 bp, Homo sapiens
gacatccagatgacccagtctccatcctccctgtctgcatctgtaggagaccgtgtcaccatcacttgccgggcaagtcaggatatttacctgaatttagactggtatcagcagaaaccagggaaagcccctaagctcctgatcaattttggttccgagttgcaaagtggtgtcccatcacgtttcagtggcagtggatatgggacagatttcactctcaccatcagcagtctgcaacctgaagatttcgctacgtactactgtcaaccggctttttacttcccttatacgttcggccaagggaccaaggtggaaatcaaacgg

SEQ ID NO: 648 - DNA, 324 bp, Homo sapiens
gacatccagatgacccagtctccatcctccctgtctgcatctgtaggagaccgtgtcaccatcacttgccgggcaagtcaggatatttacctgaatttagactggtatcagcagaaaccagggaaagcccctaagctcctgatcaattttggttccgagttgcaaagtggtgtcccatcacgtttcagtggcagtggatatgggacagatttcactctcaccatcagcagtctgcaacctgaagattttgctacgtactactgtcaaccggggttttacttcccttatacgttcggccaagggaccaaggtggaaatcaaacgg

SEQ ID NO: 649 - DNA, 324 bp, Homo sapiens
gacatccagatgacccagtctccatcctccctgtctgcatctgtaggagaccgtgtcaccatcacttgccgggcaagtcaggatatttacctgaatttagactggtatcagcagaaaccagggaaagcccctaagctcctgatcaattttggttccgagttgcaaagtggtgtcccatcacgtttcagtggcagtggatatgggacagatttcactctcaccatcagcagtctgcaacctgaagatttcgctacgtactactgtcaaccgtcttattacttcccttatacgttcggccaagggaccaaggtggaaatcaaacgg

SEQ ID NO: 650 - DNA, 324 bp, Homo sapiens
gacatccagatgacccagtctccatcctccctgtctgcatctgtaggagaccgtgtcaccatcacttgccgggcaagtcaggatatttacctgaatttagactggtatcagcagaaaccagggaaagcccctaagctcctgatcaattttggttccgagttgcaaagtggtgtcccatcacgtttcagtggcagtggatatgggacagatttcactctcaccatcagcagtctgcaacctgaagattttgctacgtactactgtcaaccttctgggtactttccttatacgttcggccaagggaccaaggtggaaatcaaacgg

SEQ ID NO: 651 - DNA, 324 bp, Homo sapiens
gacatccagatgacccagtctccatcctccctgtctgcatctgtaggagaccgtgtcaccatcacttgccgggcaagtcaggatatttacctgaatttagactggtatcagcagaaaccagggaaagcccctaagctcctgatcaattttggttccgagttgcaaagtggtgtcccatcacgtttcagtggcagtggatatgggacagatttcactctcaccatcagcagtctgcaacctgaagattttgctacgtactactgtcaaccgtcttttgctttcccttatacgttcggccaagggaccaaggtggaaatcaaacgg

SEQ ID NO: 652 - DNA, 324 bp, Homo sapiens
gacatccagatgacccagtctccatcctccctgtctgcatctgtaggagaccgtgtcaccatcacttgccgggcaagtcaggatatttacctgaatttagactggtatcagcagaaaccagggaaagcccctaagctcctgatcaattttggttccgagttgcaaagtggtgtcccatcacgtttcagtggcagtggatatgggacagatttcactctcaccatcagcagtctgcaacctgaagattttgctacgtactactgtcaaccgtcttttctgttcccttatacgttcggccaagggaccaaggtggaaatcaaacgg

SEQ ID NO: 653 - DNA, 324 bp, Homo sapiens
gacatccagatgacccagtctccatcctccctgtctgcatctgtaggagaccgtgtcaccatcacttgccgggcaagtcaggatatttacctgaatttagactggtatcagcagaaaccagggaaagcccctaagctcctgatcaattttggttccgagttgcaaagtggtgtcccatcacgtttcagtggcagtggatatgggacagatttcactctcaccatcagcagtctgcaacctgaagattttgctacgtactactgtcaaccgtctttttaccatccttatacgttcggccaagggaccaaggtggaaatcaaacgg

SEQ ID NO: 654 - DNA, 324 bp, Homo sapiens
gacatccagatgacccagtctccatcctccctgtctgcatctgtaggagaccgtgtcaccatcacttgccgggcaagtcaggatatttacctgaatttagactggtatcagcagaaaccagggaaagcccctaagctcctgatcaattttggttccgagttgcaaagtggtgtcccatcacgtttcagtggcagtggatatgggacagatttcactctcaccatcagcagtctgcaacctgaagattttgctacgtactactgtcaaccgtctttttactggccttatacgttcggccaagggaccaaggtggaaatcaaacgg

SEQ ID NO: 655 - DNA, 324 bp, Homo sapiens
gacatccagatgacccagtctccatcctccctgtctgcatctgtaggagaccgtgtcaccatcacttgccgggcaagtcaggatatttacctgaatttagactggtatcagcagaaaccagggaaagcccctaagctcctgatcaattttggttccgagttgcaaagtggtgtcccatcacgtttcagtggcagtggatatgggacagatttcactctcaccatcagcagtctgcaacctgaagattttgctacgtactactgtcaaccgtctttttacttccctcctacgttcggccaagggaccaaggtggaaatcaaacgg

SEQ ID NO: 656 - DNA, 324 bp, Homo sapiens
gacatccagatgacccagtctccatcctccctgtctgcatctgtaggagaccgtgtcaccatcacttgccgggcaagtcaggatatttacctgaatttagactggtatcagcagaaaccagggaaagcccctaagctcctgatcaattttggttccgagttgcaaagtggtgtcccatcacgtttcagtggcagtggatgggggacagatttcactctcaccatcagcagtctgcaacctgaagatttcgctacgtactactgtcaaccgtctttttacttcccttatacgttcggccaagggaccaaggtggaaatcaaacgg

SEQ ID NO: 657 - DNA, 324 bp, Homo sapiens
gacatccagatgacccagtctccatcctccctgtctgcatctgtaggagaccgtgtcaccatcacttgccgggcaagtcaggatattttcctgaatttagactggtatcagcagaaaccagggaaagcccctaagctcctgatcaattttggttccgagttgcaaagtggtgtcccatcacgtttcagtggcagtggatatgggacagatttcactctcaccatcagcagtctgcaacctgaagatttcgctacgtactactgtcaaccgtctttttacttcccttatacgttcggccaagggaccaaggtggaaatcaaacgg

SEQ ID NO: 658 - DNA, 324 bp, Homo sapiens
gacatccagatgacccagtctccatcctccctgtctgcatctgtaggagaccgtgtcaccatcacttgccgggcaagtcaggatatttacctgaatttaatgtggtatcagcagaaaccagggaaagcccctaagctcctgatcaattttggttccgagttgcaaagtggtgtcccatcacgtttcagtggcagtggatatgggacagatttcactctcaccatcagcagtctgcaacctgaagatttcgctacgtactactgtcaaccgtctttttacttcccttatacgttcggccaagggaccaaggtggaaatcaaacgg

SEQ ID NO: 659 - DNA, 324 bp, Homo sapiens
gacatccagatgacccagtctccatcctccctgtctgcatctgtaggagaccgtgtcaccatcacttgccgggcaagtcaggatatttacctgaatttactgtggtatcagcagaaaccagggaaagcccctaggctcctgatcaattttggttccgagttgcaaagtggtgtcccatcacgtttcagtggcagtggatatgggacagatttcactctcaccatcagcagtctgcaacctgaagatttcgctacgtactactgtcaaccgtctttttacttcccttatacgttcggccaagggaccaaggtggaaatcaaacgg

SEQ ID NO: 660 - DNA, 324 bp, Homo sapiens
gacatccagatgacccagtctccatcctccctgtctgcatctgcaggagaccgtgtcaccatcacttgccgggcaagtcaggatatttacctgaatttaatgtggtatcagcagaaaccagggaaagcccctaagctcctgatcaattttggttccgagttgcaaagtggtgtcccatcacgtttcagtggcagtggatatgggacagatttcactctcaccatcagcagtctgcaacctgaagatttcgctacgtactactgtcaaccgtctttttacttcccttatacgttcggccaagggaccaaggtggaaatcaaacgg

SEQ ID NO: 661 - DNA, 324 bp, Homo sapiens
gacatccagatgacccagtctccatcctccctgtctgcatctgtaggagaccgtgtcaccatcacttgccgggcaagtcaggatatttacctgaatttagcgtggtatcagcagaaaccagggaaagcccctaagctcctgatcaattttggttccgagttgcaaagtggtgtcccatcacgtttcagtggcagtggatatgggacagatttcactctcaccatcagcagtctgcaacctgaagatttcgctacgtactactgtcaaccgtctttttacttcccttatacgttcggccaagggaccaaggtggaaatcaaacgg

SEQ ID NO: 662 - DNA, 324 bp, Homo sapiens
gacatccagatgacccagtctccatcctccctgtctgcatctgtaggagaccgtgtcaccatcacttgccgggcaagtcaggatatttacctgaatttactgtggtaccagcagaaaccagggaaagcccctaagctcctgatcaattttggttccgagttgcaaagtggtgtcccatcacgtttcagtggcagtggatatgggacagatttcactctcaccatcagcagtctgcaacctgaagatttcgctacgtactactgtcaaccgtctttttacttcccttatacgttcggccaagggaccaaggtggaaatcaaacgg

SEQ ID NO: 663 - DNA, 324 bp, Homo sapiens
gacatccagatgacccagtctccatcctccctgtctgcatctgtaggagaccgtgtcaccatcacttgccgggcaagtcaggatatttacctgaatttaacctggtatcagcagaaaccagggaaagcccctaagctcctgatcaattttggttccgagttgcaaagtggtgtcccatcacgtttcagtggcagtggatatgggacagatttcactctcaccatcagcagtctgcaacctgatgatttcgctacgtactactgtcaaccgtctttttacttcccttatacgttcggccaagggaccaaggtggaaatcaaacgg

SEQ ID NO: 664 - DNA, 324 bp, Homo sapiens
gacatccagatgacccagtctccatcctccctgtctgcatctgtaggagaccgtgtcaccatcacttgccgggcaagtcaggatatttacctgaatttaccttggtaccagcagaaaccagggaaagcccctaagctcctgatcaattttggttccgagttgcaaagtggtgtcccatcacgtttcagtggcagtggatatgggacagatttcactctcaccatcagcagtctgcaacctgaagatttcgctacgtactactgtcaaccgtctttttacttcccttatacgttcggccaagggaccaaggtggaaatcaaacgg

SEQ ID NO: 665 - DNA, 324 bp, Homo sapiens
gacatccagatgacccagtctccatcctccctgtctgcatctgtaggagaccgtgtcaccatcacttgccgggcaagtcaggatatttacctgaatttaaagtggtaccagcagaaaccagggaaagcccctaagctcctgatcaattttggttccgagttgcaaagtggtgtcccatcacgtttcagtggcagtggatatgggacagatttcactctcaccatcagcagtctgcaacctgaagatttcgctacgtactactgtcaaccgtctttttacttcccttatacgttcggccaagggaccaaggtggaaatcaaacgg

SEQ ID NO: 666 - DNA, 324 bp, Homo sapiens
gacatccagatgacccagtctccatcctccctgtctgcatctgtaggagaccgtgtcaccatcacttgccgggcaagtcaggatatttacctgaatttaacgtggtaccagcagaaaccagggaaagcccctaagctcctgatcaattttggttccgagttgcaaagtggtgtcccatcacgtttcagtggcagtggatatgggacagatttcactctcaccatcagcagtctgcaacctgaagatttcgctacgtactactgtcaaccgtctttttacttcccttatacgttcggccaagggaccaaggtggaaatcaaacgg

SEQ ID NO: 667 - DNA, 324 bp, Homo sapiens
gacatccagatgacccagtctccatcctccctgtctgcatctgtaggagaccgtgtcaccatcacttgccgggcaagtcaggatatttacctgaatttagagtggtaccagcagaaaccagggaaagcccctaagctcctgatcaattttggttccgagttgcaaagtggtgtcccatcacgtttcagtggcagtggatatgggacagatttcactctcaccatcagcagtctgcaacctgaagatttcgctacgtactactgtcaaccgtctttttacttcccttatacgttcggccaagggaccaaggtggaaatcaaacgg

SEQ ID NO: 668 - DNA, 324 bp, Homo sapiens
gacatccagatgacccagtctccatcctccctgtctgcatctgtaggagaccgtgtcaccatcacttgccgggcaagtcaggatatttacctgaatttagactggtaccagcagaaaccagggaaagcccctaagctcctgatcaattttggttccgagttgaccagtggtgtcccatcacgtttcagtggcagtggatatgggacagatttcactctcaccatcagcagtctgcaacctgaagatttcgctacgtactactgtcaaccgtctttttacttcccttatacgttcggccaagggaccaaggtggaaatcaaacgg

SEQ ID NO: 669 - DNA, 324 bp, Homo sapiens
gacatccagatgacccagtctccatcctccctgtctgcatctgtaggagaccgtgtcaccatcacttgccgggcaagtcaggatatttacctgaatttagactggtatcagcagaaaccagggaaagcccctaagctcctgatcaattttggttccgagttgaacagtggtgtcccatcacgtttcagtggcagtggatatgggacagatttcactctcaccatcagcagtctgcaacctgaagatttcgctacgtactactgtcaaccgtctttttacttcccttatacgttcggccaagggaccaaggtggaaatcaaacgg

SEQ ID NO: 670 - DNA, 324 bp, Homo sapiens
gacatccagatgactcagtctccatcctccctgtctgcatctgtaggagaccgtgtcaccatcacttgccgggcaagtcaggatatttacctgaatttagactggtatcagcagaaaccagggaaagcccctaagctcctgatcaattttggttccgagttgtacagtggtgtcccatcacgtttcagtggcagtggatatgggacagatttcactctcaccatcagcagtctgcaacctgaagatttcgctacgtactactgtcaaccgtctttttacttcccttatacgttcggccaagggaccaaggtggaaatcaaacgg

SEQ ID NO: 671 - DNA, 324 bp, Homo sapiens
gacatccagatgacccagtctccatcctccctgtctgcatctgtaggagaccgtgtcaccatcacttgccgggcaagtcaggatatttacctgaatttagactggtatcagcagaaaccagggaaagcccctaagctcctgatcaattttggttccgagttgttcagtggagtcccatcacgtttcagtggcagtggatatgggacagatttcactctcaccatcagcagtctgcaacctgaagatttcgctacgtactactgtcaaccgtctttttacttcccttatacgttcggccaagggaccaaggtggaaatcaaacgg

SEQ ID NO: 672 - DNA, 324 bp, Homo sapiens
gacatccagatgacccagtctccatcctccctgtctgcatctgtaggagaccgtgtcaccatcacttgccgggcaagtcaggatatttacctgaatttagactggtatcagcagaaaccagggaaagcccctaagctcctgatcaattttggttccgagttgctcagtggtgtcccatcacgtttcagtggcagtggatatgggacagatttcactctcaccatcagcagtctgcaacctgaagatttcgctacgtactactgtcaaccgtctttttacttcccttatacgttcggccaagggaccaaggtggaaatcaaacgg

SEQ ID NO: 673 - DNA, 324 bp, Homo sapiens
gacatccagatgacccagtctccatcctccctgtctgcatctgtaggagaccgtgtcaccatcacttgccgggcaagtcaggatatttacctgaatttagactggtatcagcagaaaccagggaaagcccctaagctcctgatcaattttggttccgagttgcggagtggcgtcccatcacgtttcagtggcagtggatatgggacagatttcactctcaccatcagcagtctgcaacccgaagatttcgctacgtactactgtcaaccgtctttttacttcccttatacgttcggccaagggaccaaggtggaaatcaaacgg

SEQ ID NO: 674 - DNA, 324 bp, Homo sapiens
gacatccagatgacccagtctccatcctccctgtctgcatctgtaggagaccgtgtcaccatcacttgccgggcaagtcaggatatttacctgaatttagactggtatcagcagaaaccagggaaagcccctaagctcctgatcaattttggttccgagttgcccagtggcgtcccatcacgtttcagtggcagtggatatgggacagatttcactctcaccatcagcagtctgcaacctgaagatttcgctacgtactactgtcaaccgtctttttacttcccttatacgttcggccaagggaccaaggtggaaatcaaacgg

SEQ ID NO: 675 - DNA, 324 bp, Homo sapiens
gacatccagatgacccagtctccatcctccctgtctgcatctgtaggagaccgtgtcaccatcacttgccgggcaagtcaggatatttacctgaatttagactggtatcagcagaaaccagggaaagcccctaagcccctgatcaattttggttccgagttgcaacccggtgtcccatcacgtttcagtggcagtggatatgggacagatttcactctcaccatcagcagtctgcaacctgaagatttcgctacgtactactgtcaaccgtctttttacttcccttatacgttcggccaagggaccaaggtggaaatcaaacgg

SEQ ID NO: 676 - DNA, 324 bp, Homo sapiens
gacatccagatgacccagtctccatcctccctgtctgcatctgtaggagaccgtgtcaccatcacttgccgggcaagtcaggatatttacctgaatttagactggtatcagcagaaaccagggaaagcccctaagctcctgatcaattttggttccgagttgcaacccggtgtcccatcacgtttcagtggcagtggatatgggacagatttcactctcaccatcagcagtctgcaacctgaagatttcgctacgtactactgtcaaccgtctttttacttcccttatacgttcggccaagggaccaaggtggaaatcaaacgg

SEQ ID NO: 677 - DNA, 324 bp, Homo sapiens
gacatccagatgacccagtctccatcctccctgtctgcatctgtaggagaccgtgtcaccatcacttgccgggcaagtcaggatatttacctgaatttagactggtatcagcagaaaccagggaaagcccctaagctcctgatcaattttggttccgagttgcaacacggcgtcccatcacgtttcagtggcagtggatatgggacagatttcactctcaccatcagcagtctgcaacctgaagatttcgctacgtactactgtcaaccgtctttttacttcccttatacgttcggccaagggaccaaggtggaaatcaaacgg

SEQ ID NO: 678 - DNA, 324 bp, Homo sapiens
gacatccagatgacccagtctccatcctccctgtctgcatctgtaggagaccgtgtcaccatcacttgccgggcaagtcaggatatttacctgaatttagactggtatcagcagaaaccagggaaagcccctaagctcctgatcaattttggttccgagttgcaactcggtgtcccatcacgtttcagtggcggtggatatgggacagatttcactctcaccatcagcagtctgcaacctgaagatttcgctacgtactactgtcaaccgtctttttacttcccttatacgttcggccaagggaccaaggtggaaatcaaacgg

SEQ ID NO: 679 - DNA, 324 bp, Homo sapiens
gacatccagatgacccagtctccatcctccctgtctgcatctgtaggagaccgtgtcaccatcacttgccgggcaagtcaggatatttacctgaatttagactggtatcagcagaaaccagggaaagcccctaagctcctgatcaattttggttccgagttgcaaaagggtgtcccatcacgtttcagtggcagtggatatgggacagatttcactctcaccatcagcagtctgcaacctgaagatttcgctacgtactactgtcaaccgtctttttacttcccttatacgttcggccaagggaccaaggtggaaatcaaacgg

SEQ ID NO: 680 - DNA, 324 bp, Homo sapiens
gacatccagatgacccagtctccatcctccctgtctgcatctgtaggagaccgtgtcaccatcacttgccgggcaagtcaggatatttacctgaatttagactggtatcagcagaaaccagggaaagcccctaagctcctgatcaattttggttctgagttgcaattcggtgtcccatcacgtttcagtggcagtggatatgggacagatttcactctcaccatcagcagtctgcaacctgaagatttcgctacgtactactgtcaaccgtctttttacttcccttatacgttcggccaagggaccaaggtggaaatcaaacgg

SEQ ID NO: 681 - DNA, 324 bp, Homo sapiens
gacatccagatgacccagtctccatcctccctgtctgcatctgtaggagaccgtgtcaccatcacttgccgggcaagtcaggatatttacctgaatttagactggtatcagcagaaaccagggaaagcccctaagctcctgatcaattttggttccgagttgcaacagggtgtcccatcacgtttcagtggcagtggatatgggacagatttcactctcaccatcagcagtctgcaacctgaagatttcgctacgtactactgtcaaccgtctttttacttcccttatacgttcggccaagggaccaaggtggaaatcaaacgg

SEQ ID NO: 682 - DNA, 324 bp, Homo sapiens
gacatccagatgacccagtctccatcctccctgtctgcatctgtaggagaccgtgtcaccatcacttgccgggcaagtcaggatatttacctgaatttagactggtatcagcagaaaccagggaaagcccctaagctcctgatcaattttggttccgagttgcaaagtggtgtcccatcacgtttcagtggcagtggatatgggacagatttcactctcaccatcagcagtctgcaacctgaagatttcgctacgtactactgtaccccgtctttttacttcccttatacgttcggccaagggaccaaggtggaaatcaaacgg

SEQ ID NO: 683 - DNA, 324 bp, Homo sapiens
gacatccagatgacccagtctccatcctccctgtctgcatctgtaggagaccgtgtcaccatcacttgccgggcaagtcaggatatttacctgaatttagactggtatcagcagaaaccagggaaagcccctaagctcctgatcaattttggttccgagttgcaaagtggtgtcccatcacgtttcagtggcagtggatatgggacagatttcactctcaccatcagcagtctgcaacctgaagatttcgctacgtactactgtaagccgtctttttacttcccttatacgttcggccaagggaccaaggtggaaatcaaacgg

SEQ ID NO: 684 - DNA, 324 bp, Homo sapiens
gacatccagatgacccagtctccatcctccctgtctgcatctgtaggagaccgtgtcaccatcacttgccgggcaagtcaggatatttacctgaatttagactggtatcagcagaaaccagggaaagcccctaagctcctgatcaattttggttccgagttgcaaagtggtgtcccatcacgtttcagtggcagtggatatgggacagatttcactctcaccattagcagtctgcaacctgaagatttcgctatgtactactgtgcgccgtctttttactttccttatacgttcggccaagggaccaaggtggaaatcaaacgg

SEQ ID NO: 685 - DNA, 324 bp, Homo sapiens
gacatccagatgacccagtctccatcctccctgtctgcatctgtaggagaccgtgtcaccatcacttgccgggcaagtcaggatatttacctgaatttagactggtatcagcagaaaccagggaaagcccctaagctcctgatcaattttggttccgagttgcaaagtggtgtcccatcacgtttcagtggcagtggatatgggacagatttcactctcaccatcagcagtctgcaacctgaagatttcgctacgtactactgttccccgtctttttacttcccttatacgttcggccaagggaccaaggtggaaatcaaacgg

SEQ ID NO: 686 - DNA, 324 bp, Homo sapiens
gacatccagatgacccagtctccatcctccctgtctgcatctgtaggagaccgtgtcaccatcacttgccgggcaagtcaggatatttacctgaatttagactggtatcagcagaaaccagggaaagcccctaagctcctgatcaattttggttccgagttgcaaagtggtgtcccatcacgtttcagtggcagtggatatgggacagatttcactctcaccatcagcagtctgcaacctgaagatttcgctacgtactactgtctcccgtctttttacttcccttatacgttcggccaagggaccaaggtggaaatcaaacgg

SEQ ID NO: 687 - DNA, 324 bp, Homo sapiens
gacatccagatgacccagtctccatcctccctgtctgcatctgtaggagaccgtgtcaccatcacttgccgggcaagtcaggatatttacctgaatttagactggtatcagcagaaaccagggaaagcccctaagctcctgatcaattttggttccgagttgcaaagtggtgtcccatcacgtttcagtggcagtggatatgggacagatttcactctcaccatcagcagtctgcaacctgaagatttcgctacgtactactgtcaagcgtctttttacttcccttatacgttcggccaagggaccaaggtggaaatcaaacgg

SEQ ID NO: 688 - DNA, 324 bp, Homo sapiens
gacatccagatgacccagtctccatcctccctgtctgcatctgtaggagaccgtgtcaccatcacttgccgggcaagtcaggatatttacctgaatttagactggtatcagcagaaaccagggaaagcccctaagctcctgatcaattttggttccgagttgcaaagtggtgtcccatcacgtttcagtggcagtggatatgggacagatttcactctcaccatcagcggtctgcaacctgaagatttcgctacgtactattgtcaagcgtctttttacttcccttatacgttcggccaagggaccaaggtggaaatcaaacgg

SEQ ID NO: 689 - DNA, 324 bp, Homo sapiens
gacatccagatgacccagtctccatcctccctgtctgcatctgtaggagaccgtgtcaccatcacttgccgggcaagtcaggatatttacctgaatttagactggtatcagcagaaaccagggaaagcccctaagctcctgatcaattttggttccgagttgcaaagtggtgtcccatcacgtttcagtggcagtggatatgggacagatttcactctcaccatcagcagtctgcaacctgaagatttcgctacgtactactgtcaagggtctttttacttcccttatacgttcggccaagggaccaaggtggaaatcaaacgg

SEQ ID NO: 690 - DNA, 324 bp, Homo sapiens
gacatccagatgacccagtctccatcctccctgtctgcatctgtaggagaccgtgtcaccatcacttgccgggcaagtcaggatatttacctgaatttagactggtaccagcagaaaccagggaaagcccctaagctcctgatcagctttggttccgagttgcaaagtggtgtcccatcacgtttcagtggcagtggatatgggacagatttcactctcaccatcagcagtctgcaacctgaagatttcgctacgtactactgtcaaccgtctttttacttcccttatacgttcggccaagggaccaaggtggaaatcaaacgg

SEQ ID NO: 691 - DNA, 324 bp, Homo sapiens
gacatccagatgacccagtctccatcctccctgtctgcatctgtaggagaccgtgtcaccatcacttgccgggcaagtcaggatatttacctgaatttagactggtaccagcagaaaccagggaaagcccctaagctcctgatcacctttggttccgagttgcaaagtggtgtcccatcacgtttcagtggcagtggatatgggacagatttcactctcaccatcagcagtctgcaacctgaagatttcgctacgtactactgtcaaccgtctttttacttcccttatacgttcggccaagggaccaaggtggaaatcaaacgg

SEQ ID NO: 692 - DNA, 324 bp, Homo sapiens
gacatccagatgacccagtctccatcctccctgtctgcatctgtaggagaccgtgtcaccatcacttgccgggcaagtcaggatatttacctgaatttagactggtaccagcagaaaccagggaaagcccctaagctcctgatcatgtttggttccgagttgcaaagtggtgtcccatcacgtttcagtggcagtggatatgggacagatttcactctcaccatcagcagtctgcaacctgaagatttcgctacgtactactgtcaaccgtctttttacttcccttatacgttcggccaagggaccaaggtggaaatcaaacgg

SEQ ID NO: 693 - DNA, 324 bp, Homo sapiens
gacatccagatgacccagtctccatcctccctgtctgcatctgtaggagaccgtgtcaccatcacttgccgggcaagtcaggatatttacctgaatttagactggtaccagcagaaaccagggaaagcccctaagctcttgatcgtctttggttccgagttgcaaagtggtgtcccatcacgtttcagtggcagtggatatgggacagatttcactctcaccatcagcagtctgcaacctgaagatttcgctacgtactactgtcaaccgtctttttacttcccttatacgttcggccaagggaccaaggtggaaatcaaacgg

SEQ ID NO: 694 - DNA, 324 bp, Homo sapiens
gacatccagatgacccagtctccatcctccctgtctgcatctgtaggagaccgtgtcaccatcacttgccgggcaagtcaggatatttacctgaatttagactggtatcagcagaaaccagggaaagcccctaagctcctgatcaaatttggttccgagttgcaaagtggtgtcccatcacgtttcagtggcagtggatatgggacagatttcactctcaccatcagcagtctgcaacctgaagatttcgctacgtactactgtcaaccgtctttttacttcccttatacgttcggccaagggaccaaggtggaaatcaaacgg

SEQ ID NO: 695 - DNA, 324 bp, Homo sapiens
gacatccagatgacccagtctccatcctccctgtctgcatctgtaggagaccgtgtcaccatcacttgccgggcaagtcaggatatttacctgaatttagactggtatcagcagaaaccagggaaagcccctaagctcctgatctcctttggttccgagttgcaaagtggtgtcccatcacgtttcagaggcagtggatatgggacagatttcactctcaccatcagcagtctgcaacctgaagatttcgctacgtactactgtcaaccgtctttttacttcccttatacgttcggccaagggaccaaggtggaaatcaaacgg

SEQ ID NO: 696 - DNA, 324 bp, Homo sapiens
gacatccagatgacccagtctccatcctccctgtctgcatctgtaggagaccgtgtcaccatcacttgccgggcaagtcaggatatttacctgaatttagactggtaccagcagaaaccagggaaagcccctaagctcctgatcaattacggttccgagttgcaaagtggtgttccatcacgtttcagtggcagtggatatgggacagatttcactctcaccatcagcagtctgcaacctgaagatttcgctacgtactactgtcaaccgtctttttacttcccttatacgttcggccaagggaccaaggtggaaatcaaacgg

SEQ ID NO: 697 - DNA, 324 bp, Homo sapiens
gacatccagatgacccagtctccatcctccctgtctgcatctgtaggagaccgtgtcaccatcacttgccgggcaagtcaggatatttacctgaatttagactggtaccagcagaaaccagggaaagcccctaagctcctgatcaatagcggttccgagttgcaaagtggtgtcccatcacgtttcagtggcagtggatatgggacagatttcactctcaccatcagcagtctgcaacctgaagatttcgctacgtactactgtcaaccgtctttttacttcccttatacgttcggccaagggaccaaggtggaaatcaaacgg

SEQ ID NO: 698 - DNA, 324 bp, Homo sapiens
gacatccagatgacccagtctccatcctccctgtctgcatctgtaggagaccgtgtcaccatcacttgccgggcaagtcaggatatttacctgaatttagactggtaccagcagaaaccagggaaagcccctaagctcctgatcaatctcggttccgagttgcaaagtggtgtcccatcacgtttcagtggcagtggatatgggacagatttcactctcaccatcagcagtctgcaacctgaagatttcgctacgtactactgtcaaccgtctttttacttcccttatacgttcggccaagggaccaaggtggaaatcaaacgg

SEQ ID NO: 699 - DNA, 324 bp, Homo sapiens
gacatccagatgacccagtctccatcctccctgtctgcatctgtaggagaccgtgtcaccatcacttgccgggcaagtcaggatatttacctgaatttagactggtaccagcagaaaccagggaaagcccctaagctcctgatcaatggcggttccgagttgcaaagtggtgtcccatcacgtttcagtggcagtggatatgggacagatttcactctcaccatcagcagtctgcaacctgaagatttcgctacgtactactgtcaaccgtctttttacttcccttatacgttcggccaagggaccaaggtggaaatcaaacgg

SEQ ID NO: 700 - DNA, 324 bp, Homo sapiens
gacatccagatgacccagtctccatcctccctgtctgcatctgtaggagaccgtgtcaccatcacttgccgggcaagtcaggatatttacccgaatttagactggtaccagcagaaaccagggaaagcccctaagctcctgatcaattcgggttccgagttgcaaagtggtgtcccatcacgtttcagtggcagtggatatgggacagatttcactctcaccatcagcagtctgcaacctgaagatttcgctacgtactactgtcaaccgtctttttacttcccttatacgttcggccaagggaccaaggtggaaatcaaacgg

SEQ ID NO: 701 - DNA, 324 bp, Homo sapiens
gacatccagatgacccagtctccatcctccctgtctgcatctgtaggagaccgtgtcaccatcacttgccgggcaagtcaggatatttacctgaatttagactggtaccagcagaaaccagggaaagcccctaagctcctgatcaatctgggttccgagttgcaaagtggtgtcccatcacgtttcagtggcagtggatatgggacagatttcactctcaccatcagcagtctgcaacctgaagatttcgctacgtactactgtcaaccgtctttttacttcccttatacgttcggccaagggaccaaggtggaaatcaaacgg

SEQ ID NO: 702 - DNA, 324 bp, Homo sapiens
gacatccagatgacccagtctccatcctccctgtctgcatctgtaggagaccgtgtcaccatcacttgccgggcaagtcaggatatttacctgaatttagactggtaccagcagaaaccagggaaagcccctaagctcctgatcaatttttcgtccgagttgcaaagtggtgtcccatcacgtttcagtggcagtggatatgggacagatttcactctcaccatcagcagtctgcaacctgaagatttcgctacgtactactgtcaaccgtctttttacttcccttatacgttcggccaagggaccaaggtggaaatcaaacgg

SEQ ID NO: 703 - DNA, 324 bp, Homo sapiens
gacatccagatgacccagtctccatcctccctgtctgcatctgtaggagaccgtgtcaccatcacttgccgggcaagtcaggatatttacctgaatttagactggtaccagcagaaaccagggaaagcccctaagctcctgatcaattttgcgtccgagttgcaaagtggtgtcccatcacgtttcagtggcagtggatatgggacagatttcactctcaccatcagcagtctgcaacctgaagatttcgctacgtactactgtcaaccgtctttttacttcccttatacgttcggccaagggaccaaggtggaaatcaaacgg

SEQ ID NO: 704 - DNA, 324 bp, Homo sapiens
gacatccagatgacccagtctccatcctccctgtctgcatctgtaggagaccgtgtcaccatcacttgccgggcaagtcaggatatttacctgaatttagactggtaccagcagaaaccagggaaagcccctaagctcctgatcaattttgtgtccgagttgcaaagtggtgtcccatcacgtttcagtggcagtggatatgggacagatttcactctcaccatcagcagtctgcaacctgaagatttcgctacgtactactgtcaaccgtctttttacttcccttatacgttcggccaagggaccaaggtggaaatcaaacgg

SEQ ID NO: 705 - DNA, 324 bp, Homo sapiens
gacatccagatgacccagtctccatcctccctgtctgcatctgtaggagaccgtgtcaccatcacttgccgggcaagtcaggatatttacctgaatttagactggtaccagcagaaaccagggaaagcccctaagctcctgatcaattttggttccagcttgcaaagtggtgtcccatcacgtttcagtggcagtggatatgggacagatttcactctcaccatcagcagtctgcaacctgaagatttcgctacgtactactgtcaaccgtctttttacttcccttatacgttcggccaagggaccaaggtggaaatcaaacgg

SEQ ID NO: 706 - DNA, 324 bp, Homo sapiens
gacatccagatgacccagtctccatcctccctgtctgcatctgtaggagaccgtgtcaccatcacttgccgggcaagtcaggatatttacctgaatttagactggtaccagcagaaaccagggaaagcccctaagctcctgatcaattttggttccgcgttgcaaagtggtgtcccatcacgtttcagtggcagtggatatgggacagatttcactctcaccatcagcagtctgcaacctgaagatttcgctacgtactactgtcaaccgtctttttacttcccttatacgttcggccaagggaccaaggtggaaatcaaacgg

SEQ ID NO: 707 - DNA, 324 bp, Homo sapiens
gacatccagatgacccagtctccatcctccctgtctgcatctgtaggagaccgtgtcaccatcacttgccgggcaagtcaggatatttacctgaatttagactggtatcagcagaaaccagggaaagcccctaagctcctgatcaattttggttccacgttgcaaagtggtgtcccatcacgtttcagtggcagtggatatgggacagatttcactctcaccatcagcagtctgcaacctgaagatttcgctacgtactactgtcaaccgtctttttacttcccttatacgttcggccaagggaccaaggtggaaatcaaacgg

SEQ ID NO: 708 - DNA, 324 bp, Homo sapiens
gacatccagatgacccagtctccatcctccctgtctgcatctgtaggagaccgtgtcaccatcacttgccgggcaagtcaggatatttacctgaatttagactggtaccagcagaaaccagggaaagcccctaagctcctgatcaattttggttccgacttgcaaagtggtgtcccatcacgtttcagtggcagtggatatgggacagatttcactctcaccatcagcagtctgcaacctgaagatttcgctacgtactactgtcaaccgtctttttacttcccttatacgttcggccaagggaccaaggtggaaatcaaacgg

SEQ ID NO: 709 - DNA, 324 bp, Homo sapiens
gacatccagatgacccagtctccatcctccctgtctgcatctgtaggagaccgtgtcaccatcacttgccgggcaagtcaggatatttacctgaatttagactggtaccagcagaaaccagggaaagcccctaagctcctgatcagctttggttccgagttgcggagtggtgtcccatcacgtttcagtggcagtggatatgggacagatttcactctcaccatcagcagtctgcaacctgaagatttcgctacgtactactgtcaaccgtctttttacttcccttatacgttcggccaagggaccaaggtggaaatcaaacgg

SEQ ID NO: 710 - DNA, 324 bp, Homo sapiens
gacatccagatgacccagtctccatcctccctgtctgcatctgtaggagaccgtgtcaccatcacttgccgggcaagtcaggatatttacctgaatttagactggtatcagcagaaaccagggaaagcccctaagcttctgatcagctttggttccgagttgcaacccggtgtcccatcacgtttcagtggcagtggatatgggacagatttcactctcaccatcagcagtctgcaacctgaagatttcgctacgtactactgtcaaccgtctttttacttcccttatacgttcggccaagggaccaaggtggaaatcaaacgg

SEQ ID NO: 711 - DNA, 324 bp, Homo sapiens
gacatccagatgacccagtctccatcctccctgtctgcatctgtaggagaccgtgtcaccatcacttgccgggcaagtcaggatatttacctgaatttagactggtaccagcagaaaccagggaaagcccctaagctcctgatcagctttggttccgagttgcggcccggtgttccatcacgtttcagtggcagtggatatgggacagatttcactctcaccatcagcagtctgcaacctgaagatttcgctacgtactactgtcaaccgtctttttacttcccttatacgttcggccaagggaccaaggtggaaatcaaacgg

SEQ ID NO: 712 - DNA, 324 bp, Homo sapiens
gacatccagatgacccagtctccatcctccctgtctgcatctgtaggagaccgtgtcaccatcacttgccgggcaagtcaggatatttacctgaatttagactggtaccagcagaaaccagggaaagcccctaagctcctgatcaattttggttccgagttgcggcccggtgtcccatcacgtttcagtggcagtggatatgggacagatttcactctcaccatcagcagtctgcaacctgaagatttcgctacgtactactgtcaaccgtctttttacttcccttatacgttcggccaagggaccaaggtggaaatcaaacgg

SEQ ID NO: 713 - DNA, 324 bp, Homo sapiens
gacatccagatgacccagtctccatcctccctgtctgcatctgtaggagaccgtgtcaccatcacttgccgggcaagtcaggatatttacctgaatttagactggtaccagcagaaaccagggaaagcccctaagctcctgatcagctttggttccgagttgcaaaagggtgtcccatcacgtttcagtggcagtggatatgggacagatttcactctcaccatcagcagtctgcaacctgaagatttcgctacgtactactgtcaaccgtctttttacttcccttatacgttcggccaagggaccaaagtggaaatcaaacgg

SEQ ID NO: 714 - DNA, 324 bp, Homo sapiens
gacatccagatgacccagtctccatcctccctgtctgcatctgtaggagaccgtgtcaccatcacttgccgggcaagtcaggatatttacctgaatttagactggtatcagcagaaaccagggaaagcccctaagctcctgatcagctttggttccgagttgcggaagggtgtcccatcacgtttcagtggcagtggatatgggacagatttcactctcaccatcagcagtctgcaacctgaagatttcgctacgtactactgtcaaccgtctttttacttcccttatacgttcggccaagggaccaaggtggaaatcaaacgg

SEQ ID NO: 715 - DNA, 324 bp, Homo sapiens
gacatccagatgacccagtctccatcctccctgtctgcatctgtaggagaccgtgtcaccatcacttgccgggcaagtcaggatatttacctgaatttagactggtaccagcagaaaccagggaaagcccctaagctcctgatcaattttggttccgagttgcggaagggtgtcccatcacgtttcagtggcagtggatatgggacagatttcactctcaccatcagcagtctgcaacctgaagatttcgctacgtactactgtcaaccgtctttttacttcccttatacgttcggccaagggaccaaggtggaaatcaaacgg

SEQ ID NO: 716 - DNA, 324 bp, Homo sapiens
gacatccagatgacccagtctccatcctccctgtctgcatctgtaggagaccgtgtcaccatcacttgccgggcaagtcagacgatttacctgaatttagactggtaccagcagaaaccagggaaagcccctaagctcctgatcagctttggttccgagttgcaaaagggtgtcccatcacgtttcagtggcagtggatatgggacagatttcactctcaccatcagcagtctgcaacctgaagatttcgctacgtactactgtcaaccgtctttttacttcccttatacgttcggccaagggaccaaagtggaaatcaaacgg

SEQ ID NO: 717 - DNA, 324 bp, Homo sapiens
gacatccagatgacccagtctccatcctccctgtctgcatctgtaggagaccgtgtcaccatcacttgccgggcaagtcagacgatttacctgaatttagactggtaccagcagaaaccagggaaagcccctaagctcctgatcaattttggttccgagttgcaaagtggtgtcccatcacgtttcagtggcagtggatatgggacagatttcactctcaccatcagcagtctgcaacctgaagatttcgctacgtactactgtcaaccggctttttacttcccttatacgttcggccaagggaccaaggtggaaatcaaacgg

SEQ ID NO: 718 - DNA, 324 bp, Homo sapiens
gacatccagatgacccagtctccatcctccctgtctgcatctgtaggagaccgtgtcaccatcacttgccgggcaagtcaggatatttacctgaatttagactggtaccagcagaaaccagggaaagcccctaagctcctgatcagctttggttccgagttgcaaaagggtgtcccatcacgtttcagtggcagtggatatgggacagatttcactctcaccatcagcagtctgcaacctgaagattttgctacgtactactgtcaacaggctttttacttcccttatacgttcggccaagggaccaaggtggaaatcaaacgg

SEQ ID NO: 719 - DNA, 324 bp, Homo sapiens
gacatccagatgacccagtctccatcctccctgtctgcatctgtaggagaccgtgtcaccatcacttgccgggcaagtcagacgatttacctgaatttagactggtaccagcagaaaccagggaaagcccctaagctcctgatcagctttggttccgagttgcaaaagggtgtcccatcacgtttcagtggcagtggatatgggacagatttcactctcaccatcagcagtctgcaacctgaagattttgctacgtactactgtcaacaggctttttacttcccttatacgttcggccaagggaccaaggtggaaatcaaacgg

SEQ ID NO: 720 - DNA, 324 bp, Homo sapiens
gacatccagatgacccagtctccatcctccctgtctgcatctgtaggagaccgtgtcaccatcacttgccgggcaagtcagcagatttataatgctttacggtggtaccagcagaaaccagggaaagcccgtaagctcctgatctatcataagtcccagttgcaaagtggggtcccatcacgtttcagtggcagtggatctgggacagatttcactctcaccatcagcagtctgcaacctgaagattttgctacgtactactgtcaacagacttatagttttcctcatacgttcggccaagggaccaaggtggaaatcaaacgg

SEQ ID NO: 721 - DNA, 324 bp, Homo sapiens
gacatccagatgacccagtctccatcctccctgtctgcatctgtaggagaccgtgtcaccatcacttgccgggcaagtcaggatatttggcttaatttatcgtggtatcagcagaaaccagggaaagcccctaagctcctgatctatgatggttccactttgcaaagtggggtcccatcacgtttcagtggcagtggatctgggacagatttcactctcaccatcagcagtctgcaacctgaagattttgctacgtactactgtcaaccgtcgtttatttggccttatacgttcggccaagggaccaaggtggaaatcaaacgg

SEQ ID NO: 722 - DNA, 324 bp, Homo sapiens
gacatcaagatgacccagtctccatcctccctgtctgcatctgtaggagaccgtgtcactatcacttgccgggcaagtcagaatattggtagggagttacggtggtatcagcagaaaccagggaaagcccctaagctcctgatctatcatgcgtcccatttgcaaagtggggtcccatcacgtttcagtggcagtggatctgggacagatttcactctcaccatcagcagtctgcaacctgaagattttgctacgtactactgtcaacagtattattattttcctcttacgttcggccaagggaccaaggtggaaatcaaacgg

SEQ ID NO: 723 - protein, 108 aa, Homo sapiens
DIQMTQSPSSLSASVGDRVTITCRASQSIIKHLKWYQQKPGKAPKLLIYGASRLQSGVPSRFSGSGSGTDFTLTISSLQPEDFATYYCQQGARWPQTFGQGTKVEIKR

SEQ ID NO: 724 - protein, 108 aa, Homo sapiens
DIQMTQSPSSLSASVGDRVTITCRASQSIFRHLKWYQQKPGKAPKLLIYAASRLQSGVPSRFSGSGSGTDFTLTISSLQPEDFATYYCQQVALYPKTFGQGTKVEIKR

SEQ ID NO: 725 - protein, 108 aa, Homo sapiens
DIQMTQSPSSLSASVGDRVTITCRASQSIYYHLKWYQQKPGKAPKLLIYKASTLQSGVPSRFSGSGSGTDFTLTISSLQPEDFATYYCQQVRKVPRTFGQGTKVEIKR

SEQ ID NO: 726 - protein, 108 aa, Homo sapiens
DIQTTQSPSSLSASVGDRVTITCRASQYIGRYLRWYQQKPGKAPKLLIYDSSVLQSGVPSRFSGSGSGTDFTLTISSLQPEDFATYYCQQRYRMPYTFGQGTRVEIKR

SEQ ID NO: 727 - protein, 108 aa, Homo sapiens
DIQMTQSPSSLSASVGDRVTITCRASQYIGRYLRWYQQKPGKAPKLLIYDSSVLQSGVPSRFSGSGSGTDFTLTISSLQPEDFATYYCQQRYMQPFTFGQGTKVEIKR

SEQ ID NO: 728 - protein, 108 aa, Homo sapiens
DIQMTQSPSSLSASVGDRVTITCRASQWIGRYLRWYQQKPGKAPKLLIYNGSQLQSGVPSRFSGSGSGTDFTLTISSLQPEDFATYYCQQRYLQPYTFGQGTKVEIKR

SEQ ID NO: 729 - protein, 108 aa, Homo sapiens
DIQMTQSPSSLSASVGDRVTITCRASQYISRQLRWYQQKPGKAPRLLIYGASVLQSGIPSRFSGSGSGTDFTLTISSLQPEDFATYYCQQRYITPYTFGQGTKVEVKR

SEQ ID NO: 730 - protein, 108 aa, Homo sapiens
DIQMTQSPSSLSASVGDRVTITCRASQYIGRYLRWYQQKPGKAPKLLIYDSSVLQSGVPSRFSGSGSGTDFTLTISSLQPEDFATYYCQQRYSSPYTFGQGTKVEIKR

SEQ ID NO: 731 - protein, 108 aa, Homo sapiens
DIQMTQSPSSLSASVGDRVTITCRASQWIHRQLKWYQQKPGKAPKLLIYYASILQSGVPSRFSGSGSGTDFTLTISSLQPEDFATYYCQQTFSKPSTFGQGTKVEIKR

SEQ ID NO: 732 - protein, 108 aa, Homo sapiens
DIQMTQSPSSLSASVGDRVTITCRASQKIATYLNWYQQKPGKAPKLLIYRSSSLQSAVPSRFSGSGSGTVFTLTISSLQPEDFATYYCQQTYAVPPTFGQGTKVEIKR

SEQ ID NO: 733 - protein, 108 aa, Homo sapiens
DIQMTQSPSSLSASVGDRVTITCRASQWIDTGLAWYQQKPGKAPRLLIYNVSRLQSGVPSRFSGSGSGTDFTLTISSLQPEDFATYYCQQYWGSPTTFGQGTKVEIKR

SEQ ID NO: 734 - protein, 108 aa, Homo sapiens
DIQMTQSPSSLSASVGDRVTITCRASQEIYSWLAWYQQRPGKAPKLLIYNASHLQSGVPSRFSGSGSGTDFTLTISSLQPEDFATYYCQQVIGDPVTFGQGTKVEIKR

SEQ ID NO: 735 - protein, 108 aa, Homo sapiens
DIQMTQSPSSLSASVGDRVTITCRASQSISSYLNWYQQKPGKAPTLLIYRLSVLQSGVPSRFSGSGSGTDFTLTISSLQPEDFATYYCQQTYNVPPTFGQGTKVEIKR

SEQ ID NO: 736 - protein, 108 aa, Homo sapiens
DIQMTQSPSSLSASVGDRVTITCRASQSISSYLNWYQQKPGKAPKLLIYRNSFLQSGVPSRFSGSGSGTDFTLTISSLQPEDFATYYCQQTYTVPPTFGQGTKVEIKQ

SEQ ID NO: 737 - protein, 108 aa, Homo sapiens
DIQMTQSPSSLSASVGDRVTITCRASQSISSYLNWYQQKPGKAPKLLIYRNSQLQSGVPSRFSGSGSGTDFTLTISSLQPEDFATYYCQQTFAVPPTFGQGTKVEIKR

SEQ ID NO: 738 - protein, 35 aa, Homo sapiens
  VARIANT 30, 31: Xaa = Any Amino Acid
EVQLLESGGGLVQPGGSLRLSCAASGFTFXXYNMS

SEQ ID NO: 739 - protein, 123 aa, Homo sapiens
EVQLLESGGGLVQPGGSLRLSCAASGFTFSKYWMSWVRQAPGKGLEWVSSIDFMGPHTYYADSVKGRFTISRDNSKNTLYLQMNSLRAEDTAVYYCAKGRTSMLPMKGKFDYWGQGTLVTVSS

SEQ ID NO: 740 - protein, 118 aa, Homo sapiens
EVQLLESGGGLVQPGGSLRLSCAASGFTFYDYNMSWVRQAPGKGLEWVSTITHTGGVTYYADSVKGRFTISRDNSKNTLYLQMNSLRAEDTAVYYCAKQNPSYQFDYWGQGTLVTVSS

SEQ ID NO: 741 - protein, 118 aa, Homo sapiens
EVQLLESGGGLVQPGGSLRLSCAASGFTFHRYSMSWVRQAPGKGLEWVSTILPGGDVTYYADSVKGRFTISRDNSKNTLYLQMNSLRAEDTAVYYCAKQTPDYMFDYWGQGTLVTVSS

SEQ ID NO: 742 - protein, 117 aa, Homo sapiens
EVQLLESGGGLVQPGGSLRLSCAASGFTFWKYNMAWVRQAPGKGLEWVSTILGEGNNTYYADSVKGRFTISRDNSKNTLYLQMNSLRAEDTAVYYCAKTMDYKFDYWGQGTLVTVSS

SEQ ID NO: 743 - protein, 118 aa, Homo sapiens
EVQLLESGGGLVQPGGSLRLSCTASGFTFDEYNMSWVRQAPGKGLEWVSTILPHGDRTYYADSVKGRFTISRDNSKNTLYLQMNSLRAEDTAVYYCAKQDPLYRFDYWGQGTLVTVSS

SEQ ID NO: 744 - protein, 120 aa, Homo sapiens
EVQLLESGGGLVQPGGSLRLSCAASGFTFDLYDMSWVRQAPGKGLEWVSSIVNSGVRTYYADSVKGRFTISRDNSKNTLYLQMNSLRAEDTAVYYCAKLNQSYHWDFDYWGQGTLVTVSS

SEQ ID NO: 745 - protein, 118 aa, Homo sapiens
EVQLLESGGGLVQPGGSLRLSCAASGFTFSDYRMSWVRQAPGKGLEWVSTIISNGKFTYYADSVKGRFTISRDNSKNTLYLQMNSLRAEDTAVYYCAKQDWMYMFDYWGQGTLVTVSS

SEQ ID NO: 746 - protein, 108 aa, Homo sapiens
DIQMTQSPSSLSASVGDRVTITCRASQSISSYLNWYQQKPGKAPKLLIYRNSPLQSGVPSRFSGSGSGTDFTLTISSLQPEDFATYYCQQTYRVPPTFGQGTKVEIKR

SEQ ID NO: 747 - protein, 108 aa, Homo sapiens
DIQMTQSPSSLSASVGDRVTITCRASQHIHRELRWYQQKPGKAPKLLIYQASRLQSGVPSRFSGSGSGTDFTLTISSLQPEDFATYYCQQKYLPPYTFGQGTKVEIKR

SEQ ID NO: 748 - protein, 108 aa, Homo sapiens
DIQMTQSPSSLSASVGDRVTITCRASQHIHRELRWYQQKPGKAPKLLIYQASRLQSGVPSRFSGSGSGTDFTLTISSLQPEDFATYYCQQRYRVPYTFGQGTKVEIKR

SEQ ID NO: 749 - protein, 108 aa, Homo sapiens
DIQMTQSPSSLSASVGDRVTITCRASQSIGRRLKWYQQKPGAAPRLLIYRTSWLQSGVPSRFSGSGSGTDFTLTISSLQPEDFATYYCQQTSQWPHTFGQGTKVEIKR

SEQ ID NO: 750 - protein, 108 aa, Homo sapiens
DIQMTQSPSSLSASVGDRVTITCRASQKIYKNLRWYQQKPGKAPKLLIYNSSILQSGVPSRFSGSGSGTDFTLTISSLQPEDFATYYCQQRYLSPYTFGQGTKVEIKR

SEQ ID NO: 751 - protein, 108 aa, Homo sapiens
DIQMTQSPSSLSASVGDRVTITCRASQKIYNNLRWYQQKPGKAPKLLIYNTSILQSGVPSRFSGSGSGTDFTLTISSLQPEDFATYYCQQRWRAPYTFGQGTKVEIKR

SEQ ID NO: 752 - protein, 108 aa, Homo sapiens
DIQMTQSPSSLSASVGDRVTITCRASQWIYKSLGWYQQKPGKAPKLLIYQSSLLQSGVPSRFSGSGSGTDFTLTISSLQPEDFATYYCQQYHQMPRTFGQGTKVEIKR

SEQ ID NO: 753 - protein, 108 aa, Homo sapiens
DIQMTQSPSSLSASVGDRVTITCRASQWIYRHLRWYQQKPGKAPKLLIYDASRLQSGVPTRFSGSGSGTDFTLTISSLQPEDFATYYCQQTHNPPKTFGQGTKVEIKR

SEQ ID NO: 754 - protein, 116 aa, Homo sapiens
EVQLLESGGGLVQPGGSLRLSCAASGFTFWPYTMSWVRQAPGKGLEWVSTISPFGSTTYYADSVKGRFTISRDNSKNTLYLQMNSLRAEDTAVYYCAKGGKDFDYWGQGTLVTVSS

SEQ ID NO: 755 - protein, 117 aa, Homo sapiens
EVQLLESGGGLVQPGGSLRLSCAASGFTFWPYTMSWVRQAPGKGLEWVSTISPFGSTTYYADSVKGRFTISRDNSKNTLYLQMNSLRAEDTAVYYCAKGNLEPFDYWGQGTLVTVSS

SEQ ID NO: 756 - protein, 117 aa, Homo sapiens
EVQLLESGGGLVQPGGSLRLSCAASGFTFWPYTMSWVRQAPGKGLEWVSTISPFGSTTYYADSVKGRFTISRDNSKNTLYLQMNSLRAEDTAVYYCAKKLSNGFDYWGQGTLVTVSS

SEQ ID NO: 757 - protein, 118 aa, Homo sapiens
EVQLLESGGGLVQPGGSLRLSCAASGFTFWPYTMSWVRQAPGKGLEWVSTISPFGSTTYYADSVKGRFTISRDNSKNTLYLQMNSLRAEDTAVYYCAKVVKDNTFDYWGQGTLVTVSS

SEQ ID NO: 758 - protein, 118 aa, Homo sapiens
EVQLLESGGGLVQPGGSLRLSCAASGFTFWPYTMSWVRQAPGKGLEWVSTISPFGSTTYYADSVKGRFTISRDNSKNTLYLQMNSLRAEDTAVYYCAKNTGGKQFDYWGQGTLVTVSS

SEQ ID NO: 759 - protein, 118 aa, Homo sapiens
EVQLLESGGGLVQPGGSLRLSCAASGFTFWPYTMSWVRQAPGKGLEWVSTISPFGSTTYYADSVKGRFTISRDNSKNTLYLQMNSLRAEDTAVYYCAKKTGPSSFDYWGQGTLVTVSS

SEQ ID NO: 760 - protein, 120 aa, Homo sapiens
EVQLLESGGGLVQPGGSLRLSCAASGFTFWPYTMSWVRQAPGKGLEWVSTISPFGSTTYYADSVKGRFTISRDNSKNTLYLQMNSLRAEDTAVYYCAKRTENRGVSFDYWGQGTLVTVSS

SEQ ID NO: 761 - protein, 122 aa, Homo sapiens
EVQLLESGGGLVQPGGSLRLSCAASGFTFWPYTMSWVRQAPGKGLEWVSTISPFGSTTYYADSVKGRFTISRDNSKNTLYLQMNSLRAEDTAVYYCAKSDVLKTGLDGFDYWGQGTLVTVSS

SEQ ID NO: 762 - protein, 120 aa, Homo sapiens
EVQLLESGGGLVQPGGSLRLSCAASGFTFMAYQMAWVRQAPGKGLEWVSTIHQTGFSTYYADSVKGRFTISRDNSKNTLYLQMNSLRAEDTAVYYCAKVRSMRPYKFDYWGQGTLVTVSS

SEQ ID NO: 763 - protein, 120 aa, Homo sapiens
EVQLLESGGGLVQPGGSLRLSCAASGFTFKDYDMTWVRQAPGKGLEWVSMISSSGLWTYYADSVKGRFTISRDNSKNTLYLQMNSLRAEDTAVYYCAKGFRLFPRTFDYWGQGTLVTVSS

SEQ ID NO: 764 - protein, 121 aa, Homo sapiens
EVQLLESGGGLVQPGGSLRLSCAASGFTFHDYVMGWARQAPGKGLEWVSLIKPNGSPTYYADSVKGRFTISRDNSKNTLYLQMNSLRAEDTAVYYCAKGRGRFNVLQFDYWGQGTLVTVSS

SEQ ID NO: 765 - protein, 118 aa, Homo sapiens
EVQLLESGGGLVQPGGSLRLSCTASGFTFRHYRMGWVRQAPGKGLEWVSWIRPDGTFTYYADSVKGRFTISRDNSKNTLYLQMNSLRAEDTAVYYCAKSYMGDRFDYWGQGTLVTVSS

SEQ ID NO: 766 - protein, 116 aa, Homo sapiens
EVQLLESGGGLVQPGGSLRLSCAASGFTFMWDKMGWVRQAPGKGLEWVSFIGREGYGTYYADSVKGRFTISRDNSKNTLYLQMNSLRAEDTAVYYCAKSVASFDYWGQGTLVTVSS

SEQ ID NO: 767 - protein, 117 aa, Homo sapiens
EVQLLESGGGLVQPGGSLRLSCAASGFTFWAYPMSWVRQAPGKGLEWVSSISSWGTGTYYADSVKGRFTISRDNSKNTLYLQMNSLRAEDTAVYYCAKGGQGSFDYWGQGTLVTVSS

SEQ ID NO: 768 - protein, 115 aa, Unknown
  Camelid
QVQLQESGGGLVQPGGSLRLSCEASGFTFSRFGMTWVRQAPGKGVEWVSGISSLGDSTLYADSVKGRFTISRDNAKNTLYLQMNSLKPEDTAVYYCTIGGSLNPGGQGTQVTVSS

SEQ ID NO: 769 - protein, 115 aa, Unknown
  Camelid
QVQLQESGGGLVQPGNSLRLSCAASGFTFRNFGMSWVRQAPGKEPEWVSSISGSGSNTIYADSVKDRFTISRDNAKSTLYLQMNSLKPEDTAVYYCTIGGSLSRSSQGTQVTVSS

SEQ ID NO: 770 - protein, 114 aa, Unknown
  Camelid
QVQLQESGGGLVQPGGSLRLTCTASGFTFSSFGMSWVRQAPGKGLEWVSAISSDSGTKNYADSVKGRFTISRDNAKKMLFLQMNSLRPEDTAVYYCVIGRGSPSSQGTQVTVSS

SEQ ID NO: 771 - protein, 114 aa, Unknown
  Camelid
QVQLQESGGGLVQPGGSLRLTCTASGFTFRSFGMSWVRQAPGKGLEWVSAISADGSDKRYADSVKGRFTISRDNGKKMLTLDMNSLKPEDTAVYYCVIGRGSPASQGTQVTVSS

SEQ ID NO: 772 - protein, 128 aa, Unknown
  Camelid
AVQLVESGGGLVQAGDSLRLSCVVSGTTFSSAAMGWFRQAPGKEREFVGAIKWSGTSTYYTDSVKGRFTISRDNVKNTVYLQMNNLKPEDTGVYTCAADRDRYRDRMGPMTTTDFRFWGQGTQVTVSS

SEQ ID NO: 773 - protein, 124 aa, Unknown
  Camelid
QVKLEESGGGLVQTGGSLRLSCAASGRTFSSFAMGWFRQAPGREREFVASIGSSGITTNYADSVKGRFTISRDNAKNTVYLQMNSLKPEDTGLCYCAVNRYGIPYRSGTQYQNWGQGTQVTVSS

SEQ ID NO: 774 - protein, 120 aa, Unknown
  Camelid
EVQLEESGGGLVQPGGSLRLSCAASGLTFNDYAMGWYRQAPGKERDMVATISIGGRTYYADSVKGRFTISRDNAKNTVYLQMNSLKPEDTAIYYCVAHRQTVVRGPYLLWGQGTQVTVSS

SEQ ID NO: 775 - protein, 123 aa, Unknown
  Camelid
QVQLVESGGKLVQAGGSLRLSCAASGRTFSNYAMGWFRQAPGKEREFVAGSGRSNSYNYYSDSVKGRFTISRDNAKNTVYLQMNSLKPEDTAVYYCAASTNLWPRDRNLYAYWGQGTQVTVSS

SEQ ID NO: 776 - protein, 125 aa, Unknown
  Camelid
EVQLVESGGGLVQAGDSLRLSCAASGRSLGIYRMGWFRQVPGKEREFVAAISWSGGTTRYLDSVKGRFTISRDSTKNAVYLQMNSLKPEDTAVYYCAVDSSGRLYWTLSTSYDYWGQGTQVTVSS

SEQ ID NO: 777 - protein, 125 aa, Unknown
  Camelid
QVQLVEFGGGLVQAGDSLRLSCAASGRSLGIYKMAWFRQVPGKEREFVAAISWSGGTTRYIDSVKGRFTLSRDNTKNMVYLQMNSLKPDDTAVYYCAVDSSGRLYWTLSTSYDYWGQGTQVTVSS

SEQ ID NO: 778 - protein, 124 aa, Unknown
  Camelid
EVQLVESGGGLVQAGGSLSLSCAASGRTFSPYTMGWFRQAPGKEREFLAGVTWSGSSTFYGDSVKGRFTASRDSAKNTVTLEMNSLNPEDTAVYYCAAAYGGGLYRDPRSYDYWGRGTQVTVSS

SEQ ID NO: 779 - protein, 131 aa, Unknown
  Camelid
AVQLVESGGGLVQAGGSLRLSCAASGFTLDAWPIAWFRQAPGKEREGVSCIRDGTTYYADSVKGRFTISSDNANNTVYLQTNSLKPEDTAVYYCAAPSGPATGSSHTFGIYWNLRDDYDNWGQGTQVTVSS

SEQ ID NO: 780 - protein, 126 aa, Unknown
  Camelid
EVQLVESGGGLVQAGGSLRLSCAASGFTFDHYTIGWFRQVPGKEREGVSCISSSDGSTYYADSVKGRFTISSDNAKNTVYLQMNTLEPDDTAVYYCAAGGLLLRVEELQASDYDYWGQGIQVTVSS

SEQ ID NO: 781 - protein, 128 aa, Unknown
  Camelid
AVQLVDSGGGLVQPGGSLRLSCTASGFTLDYYAIGWFRQAPGKEREGVACISNSDGSTYYGDSVKGRFTISRDNAKTTVYLQMNSLKPEDTAVYYCATADRHYSASHHPFADFAFNSWGQGTQVTVSS

SEQ ID NO: 782 - protein, 120 aa, Unknown
  Camelid
EVQLVESGGGLVQAGGSLRLSCAAYGLTFWRAAMAWFRRAPGKERELVVARNWGDGSTRYADSVKGRFTISRDNAKNTVYLQMNSLKPEDTAVYYCAAVRTYGSATYDIWGQGTQVTVSS

SEQ ID NO: 783 - protein, 123 aa, Unknown
  Camelid
EVQLVESGGGLVQDGGSLRLSCIFSGRTFANYAMGWFRQAPGKEREFVAAINRNGGTTNYADALKGRFTISRDNTKNTAFLQMNSLKPDDTAVYYCAAREWPFSTIPSGWRYWGQGTQVTVSS

SEQ ID NO: 784 - protein, 125 aa, Unknown
  Camelid
DVQLVESGGGWVQPGGSLRLSCAASGPTASSHAIGWFRQAPGKEREFVVGINRGGVTRDYADSVKGRFAVSRDNVKNTVYLQMNRLKPEDSAIYICAARPEYSFTAMSKGDMDYWGKGTLVTVSS

SEQ ID NO: 785 - protein, 122 aa, Homo sapiens
EVQLLESGGGLVQPGGSLRLSCAASGFTFVAYNMGWVRQAPGKGLEWVSFIDMYGAKTYYADSVKGRFTISRDNSKNTLYLQMNSLRAEDTAVYYCAKLCLMDCSGDIFDYWGQGTLVTVSS

SEQ ID NO: 786 - protein, 116 aa, Homo sapiens
EVQLLESGGGLVQPGGSLRLSCAASGFTFPADEMYWVRQAPGKGLEWVSSIGWPGGATYYADSVKGRFTISRDNSKNTLYLQMNSLRAEDTAVYYCAKYGRNFDYWGQGTLVTVSS

SEQ ID NO: 787 - protein, 122 aa, Homo sapiens
EVQLLESGGGLVQPGGSLRLSCAASGFTFDQYDMSWVRQAPGKGLEWVSLIDPSGGHTYYADSVKGRFTISRNNSKNTLYLQMNSLRAEDTAVYYCAKPVFSDWPAVEFDYWGQGTLVTVSS

SEQ ID NO: 788 - protein, 116 aa, Homo sapiens
EVQLLESGGGLVQPGGSLRLSCAASGFTFGNYDMQWVRQAPGKGLEWVSSIDGTGGTTYYADSVKGRFTISRDNSKNTLYLQMNSLRAEDTAVYYCAQETNAFDYWGQGTLVTVSS

SEQ ID NO: 789 - protein, 124 aa, Homo sapiens
EVQLLESGGGLVQPGGSLRLSCAASGFTFGGYQMGWVRQAPGKGLEWVSFIDFTGAHTYYADSVKGRFTISRDNSKNTLYLQMNSLRAEDTAVYYCAKLSDDLTLPERFPFDYWGQGTLVTVSS

SEQ ID NO: 790 - protein, 123 aa, Homo sapiens
EVQLLESGGGLVQPGGSLRLSCAASGFTFADYNMTWVRQAPGKGLEWVSWIDQEGVFTYYADSVKGRFTISRDNSKNTLYLQMNSLRAEDTAVYYCAKDFSAAVMLRTSFDYWGQGTLVTVSS

SEQ ID NO: 791 - protein, 116 aa, Homo sapiens
EVQLLESGGGLVQPGGSLRLSCAVSGFTFHDYGMVWVRQAPGKGLEWVSQISIDGRTTYYADSVKGRFTISRDNSKNTLYLQMNSLRAEDTAVYYCAKRIFEFDYWGQGTLVTVSS

SEQ ID NO: 792 - protein, 117 aa, Homo sapiens
EVQLLESGGGLVQPGGSLRLSCAASGFTFSAYNMSWVRQAPGKGLEWVSAISPSGNETYYADSVKGRFTISRDNSKNTLYLQMNSLRAEDTAVYYCAKGAGEAFDYWGQGTLVTVSS

SEQ ID NO: 793 - protein, 117 aa, Homo sapiens
EVQLLESGGGLVQPGGSLRLSCAASGFTFTEYNMGWVRQAPGKGLEWVSFIGHSGQHTYYADSVKGRFTISRDNSKNTLYLQMNSLRAEDTAVYYCAELNNLMFDYWGQGTLVTVSS

SEQ ID NO: 794 - protein, 121 aa, Homo sapiens
EVQLLESGGGLVQPGGSLRLSCAASGFTFGEYNMAWVRQAPGKGQEWVSFISTGGHVTYYADSVKGRFTISRDNSKNTLYLQMNSLRAEDTAVYYCAKFSVRFRSSIFDYWGQGTLVTVSS

SEQ ID NO: 795 - protein, 122 aa, Homo sapiens
EVQLLESGGGLVQPGGSLRLSCAASGYTFTEYTMGWVRQAPGKGLEWVSWIAVDGIHTYYADSVKGRFTISRDNSKNTLYLQMNSLRAEDTAVYYCAKLDWTATDFSIFDYWGQGTLVTVSS

SEQ ID NO: 796 - protein, 122 aa, Homo sapiens
EVQLLESGGGLVQPGGSLRLSCAASGFTFANYTMLWVRQAPGKGLEWVSVISAEGRTTYYADSVKGRFTISRDNSKNTLYLQMNSLRAEDTAVYYCAKLNMKATNFKDFDYWGQGTLVTVSS

SEQ ID NO: 797 - protein, 122 aa, Homo sapiens
EVQLLESGGGLVQPGGSLRLSCAASGFTFSEYAMLWVRQAPGKGLEWVSLIDRTGVITYYADSVKGRFTISRDNSKNTLYLQMNSLRAEDTAVYYCAKRDYQYHLYQDFDYRGQGTLVTVSS

SEQ ID NO: 798 - protein, 122 aa, Homo sapiens
EVQLLESGGGLVQPGGSLRLSCAASGFTFATYSMGWVRQAPGKGLEWVSMIDPEGYHTYYADSVKGRFTISRDNSKNTLYLQMNSLRAEDTAVYYCAETNRPLTYKPWFDYWGQGTLVTVSS

SEQ ID NO: 799 - protein, 121 aa, Homo sapiens
EVQLLESGGGLVQPGGSLRLSCAASGFTFTDYNMAWVRQAPGKGLEWVSFISQEGHHTYYADSVKGRFTISRDNSKNTLYLQMNSLRAEDTAVYYCAKFSTIATLSLFDYWGQGTLVTVSS

SEQ ID NO: 800 - protein, 122 aa, Homo sapiens
EVQLLESGGGLVQPGGSLRLSCAASGFTFATYNMGWVRQAPGKGLEWVSSIAWLGSETYYADSVKGRFTISRDNSKNTLYLQMNSLRAEDTAVYYCAKHCKAECTGDLFDYWGQGTLVTVSS

SEQ ID NO: 801 - protein, 122 aa, Homo sapiens
EVQLLESGGGLVQPGGALRLSCAASGFTFGIYSMGWVRQAPGKGLEWVSSISGVGMETYYADSVKGRFTISRDNSENTLYLQMNSLRAEDTAVYYCAKHSYPTRGRHLFDYWGQGTLVTVSS

SEQ ID NO: 802 - protein, 120 aa, Homo sapiens
EVQLLESGGGLVQPGGSLRLSCAASGFTFEWYWMGWVRQAPGKGLEWVSAISGSGGSTYYADSVKGRFTISRDNSKNTLYLQMNSLRAEDTAVYYCAKVKLGGGPNFDYRGQGTLVTVSS

SEQ ID NO: 803 - protein, 120 aa, Homo sapiens
EVQLLESGGGLVQPGGSLRLSCAASGFTFHRYSMGWVRQAPGKGLEWVSAISSSGGITYYADSVKGRFTISRDNSKNTLYLQMNSLRAEDTAVYYCAKSTQAQGLELDYWGQGTLVTVSS

SEQ ID NO: 804 - protein, 120 aa, Homo sapiens
EVQLLESGGGLVQPGGSLRLSCAASGFTFEWYWMGWVRQAPGKGLEWVSAISGSGGSTYYADSVKGRFTISRDNSKNTLYLQMNNLRAEDTAVYYCAKVKLGGGPNFDYRGQGTLVTVSS

SEQ ID NO: 805 - protein, 120 aa, Homo sapiens; identical to SEQ ID NO: 802

SEQ ID NO: 806 - protein, 120 aa, Homo sapiens
EVQLLESGGGLVQPGGSLRLTCAASGFTFEWYWMGWVRQAPGKGLEWVSAISGSGGSTYYADSVKGRFTISRDNSKNTLYLQMNSLRAEDTAVYYCAKVKLGGGPNFDYWGQGTLVTVSS

SEQ ID NO: 807 - protein, 120 aa, Homo sapiens
EVQLLESGGGLVQPGGSLRLSCAASGFTFEWYWMGWIRQAPGKGLEWVSAISGSGGSTYYADSVKGRFTISRDNSKNTLYLQMNSLRAEDTAVYYCAKVKLGGGPNFDYWGQGTLVTVSS

SEQ ID NO: 808 - protein, 120 aa, Homo sapiens; identical to SEQ ID NO: 802

SEQ ID NO: 809 - protein, 120 aa, Homo sapiens
EVQLLESGGGLVQPGGSLRLSCAASGFTFEWYWMGWVRQAPGKGPEWVSAISGSGGSTYYADSVKGRFTISRDNSKNTLYLQMNSLRAEDTAVYYCAKVKLGGGPNFDYRGQGTLVTVSS

SEQ ID NO: 810 - protein, 120 aa, Homo sapiens
EVQLLESGGGLVQPGGSLRLSCAASGFTFEWYWMGWVRQAPGKGLEWVSAISGSGGSTYYADSVKGRFTISRDNSKNTLYLQMNSLRAKDTAVYYCAKVKLGGGPNFDYRGQGTLVTVSS

SEQ ID NO: 811 - protein, 120 aa, Homo sapiens
EVQLLESGGGLVQPGGSLRLSCAASGFTFEWYWMGWVRQAPGKGLEWVSAISGSGGSTYYADSVKGRFTISRDNSKNTLYLQMNSLRAGDTAVYYCAKVKLGGGPNFDYRGQGTLVTVSS

SEQ ID NO: 812 - protein, 120 aa, Homo sapiens
EVQLLESGGGLVQPGGSLRLSCAASGFTFEWYWMGWVRQAPGKGLEWVSAISGSGGRTYYADSVKGRFTISRDNSKNTLYLQMNSLRAEDTAVYYCAKVKLGGGPNFDYWGQGTLVTVSS

SEQ ID NO: 813 - protein, 120 aa, Homo sapiens
EVQLLESGGGLVQPGGSLRLSCAASGFTFEWYWMGWVRQAPGKGLEWVSAISGSGGSTYYADSVKGRFTISRDNSKNTLYLQMNSLRAEDTAVYYCAKVKLGGGPNFDDRGQGTLVTVSS

SEQ ID NO: 814 - protein, 120 aa, Homo sapiens
EVQLLESGGGLVQPGGSLRLSCAASGFTFEWYWMGWVRQAPGKGLEWVSAISGSGGSKYYADSVKGRFTISRDNSKNTLYLQMNSLRAEDTAVYYCAKVKLGGGPNFDYRGQGTLVTVSS

SEQ ID NO: 815 - protein, 120 aa, Homo sapiens
EVQLLESGGGLVQPGGSLRLSCAASGFTFGWYWMGWVRQAPGKGLEWASAISGSGGNTYYADSVKGRFTISRDNSKNTLYLQMNSLRAEDTAVYYCAKVKLGGGPNFDYWGQGTLVTVSS

SEQ ID NO: 816 - protein, 120 aa, Homo sapiens
EVQLLESGGGLVQPGGSLRLSCAASGFTFEWYWMGWVRQAPGKGLGWVSAISGSGGSTYYADSVRGRFTISRDNSKNTLYLQMNSLRAEDTAVYYCAKVKLGGGPNFDYRGQGTLVTVSS

SEQ ID NO: 817 - protein, 120 aa, Homo sapiens
  VARIANT 20: Xaa = Any Amino Acid
EVQLLESGGGLVQPGGSLRXSCAASGFTFEWYWMGWVRQAPGKGPEWVSAISGSGGSTYYADSVKGRFTISRDNSKNTLYLQMNSLRAEDTAVYYCAKVKLGGGPNFDYWGQGTLVTVSS

SEQ ID NO: 818 - protein, 120 aa, Homo sapiens
EVQLLESGGGLVQPGGSLRLSCAASGFTFEWYWMGWVRQAPGKGLEWVSAISGSGGSTYYADSVKGRFTISRDNSKNTLYLQMNSLRAEDTAVYYCAKVKLGGGPNFDYRGRGTLVTVSS

SEQ ID NO: 819 - protein, 120 aa, Homo sapiens
EVQLLESGGGLVQPGGSLRLSCAASGFTFEWYWMGWIRQAPGKGLEWVSAISGSGGSTYYADSVKGRFTISRDNSKNTLYLQMNSLRAKDTAVYYCAKVKLGGGPNFDYRGQGTLVTVSS

SEQ ID NO: 820 - protein, 120 aa, Homo sapiens
EVQLLESGGGLVQPGGSLRLSCAASGFTFEWYWMGWIRQAPGKGLGWVSAISGSGGSTYYADSVRGRFTISRDNSKNTLYLQMNSLRAEDTAVYYCAKVKLGGGPNFDYRGQGTLVTVSS

SEQ ID NO: 821 - protein, 120 aa, Homo sapiens; identical to SEQ ID NO: 815

SEQ ID NO: 822 - protein, 120 aa, Homo sapiens
EVQLLESGGGLVQPGGSLRLSCAASGFTFEWYWMGWVRQAPGKGLGWVSAISGSGGSTYYADSVRGRFTISRDNSKNTLYLQMNSLRAKDTAVYYCAKVKLGGGPNFDYRGQGTLVTVSS

SEQ ID NO: 823 - protein, 120 aa, Homo sapiens
EVQLLESGGGLVQPGGSLRLSCAASGFTFGWYWMGWVRQAPGKGLEWASAISGSGGNTYYADSVKGRFTISRDNSKNTLYLQMNSLRAKDTAVYYCAKVKLGGGPNFDYWGQGTLVTVSS

SEQ ID NO: 824 - protein, 120 aa, Homo sapiens
EVQLLESGGGLVQPGGSLRLSCAASGFTFGWYWMGWVRQAPGKGLEWVSAISGSGGSTYYADSVKGRFTISRDNSKNTLYLQMNSLRAKDTAVYYCAKVKLGGGPNFDYRGQGTLVTVSS

SEQ ID NO: 825 - protein, 120 aa, Homo sapiens
EVQLLESGGGLVQPGGSLRLSCAASGFTFGWYWMGWVRQAPGKGLGWVSAISGSGGSTYYADSVRGRFTISRDNSKNTLYLQMNSLRAEDTAVYYCAKVKLGGGPNFDYRGQGTLVTVSS

SEQ ID NO: 826 - protein, 120 aa, Homo sapiens
EVQLLESGGGLVQPGGSLRLSCAASGFTFEWYWMGWVRQAPGKGLEWVSAISGSGGSTYYADSVKGRFTISRDNSKNTLYLQMNSLRAEDAAVYYCAKVKLGGGPNFGYRGQGTLVTVSS

SEQ ID NO: 827 - protein, 120 aa, Homo sapiens
EVQLLESGGGLVQPGGSLRLSCAASGFDFEWYWMGWVRQAPGKGLEWVSAISGSGGSTYYADSVKGRFTISRDNSKNTLYLQMNSLRAEDAAVYYCAKVKLGGGPNFGYRGQGTLVTVSS

SEQ ID NO: 828 - protein, 120 aa, Homo sapiens
EVQLLESGGGLVQPGGSLRLSCAASGFTFEWYWMGWVRQAPGKGLEWVSAISGSGGSTYYADSVKGRFTISRDNSKSTLYLQMNSLRAEDAAVYYCAKVKLGGGPNFGYRGQGTLVTVSS

SEQ ID NO: 829 - protein, 120 aa, Homo sapiens
EVQLLESGGGLVQPGGSLRLSCAASGFDFEWYWMGWVRQAPGKGLEWVSAISGSGGSTYYADSVKGRFTISRDNSKNTLYLQMNSLHAEDAAVYYCAKVKLGGGPNFGYRGQGTLVTVSS

SEQ ID NO: 830 - protein, 120 aa, Homo sapiens
EVQLLESGGGLVQPGGSLRLSCAVSGLTFEWYWMGWVRQAPGKGLEWVSAISGSGGSTYYADSVKGRFTISRDNSKNTLYLQMNSLRAEDAAVYYCAKVKLGGGPNFGYRGQGTLVTVSS

SEQ ID NO: 831 - protein, 120 aa, Homo sapiens
EVQLLGSGGGLVQPGGSLRLSCAASGFTFAWYWMGWVRQAPGKGLEWVSAISGSGGSTYYADSVKGRFTISRDNSKNTLYLQMNSLRAEDAAVYYCAKVKLGGGPNFGYRGQGTLVTVSS

SEQ ID NO: 832 - protein, 120 aa, Homo sapiens
EVQLLESGGGLVQPGGSLRLSCAASGFTFEWYWMGWVRQAPGKGLEWVSAISGSGGSTYYADSVKGRFTISRDNSKNTLYLQMNSLRAKDAAVYYCAKVKLGGGPNFGYRGQGTLVTVSS

SEQ ID NO: 833 - protein, 120 aa, Homo sapiens
EVQLLESGGGLVQPGGSLRLSCAASGFTFEPYWMGWVRQAPGKGLEWVSAISGSGGSTYYADSVKGRFTISRDNSKNTLYLQMNSLRAEDAAVYYCAKVKLGGGPNFGYRGQGTLVTVSS

SEQ ID NO: 834 - protein, 120 aa, Homo sapiens
EVQLLESGGGFVQPGGSLRLSCAASGFTFEWYWMSWVRQAPGKGLEWVSAISGSGGSTYYADSVKGRFTISRDNSKNTLYLQMNSLRAEDASVYYCAKVKLGGGPNFGYRGQGTLVTVSS

SEQ ID NO: 835 - protein, 120 aa, Homo sapiens
EVQLLESGGGLVQPGGSLRLPCAASGFTFEWYWMTWVRQAPGKGLEWVSAISGSGGSTYYADSVKGRFTISRDNSKNTLYLQMNSLRAEDAAVYYCAKVKLGGGPNFGYRGQGTLVTVSS

SEQ ID NO: 836 - protein, 120 aa, Homo sapiens
EVQLLESGGGLVQPGGSLRLSCAASGLTFEWYWMGWVRQAPGKGLEWVSAISGSGGSTYYADSVKGRFTISRDNSKNTLYLQMNSLRAEDAAVYYCAKVKLGGGPNFGYRGQGTLVTVSS

SEQ ID NO: 837 - protein, 120 aa, Homo sapiens
EVQLLESGGGLVQPGGSLRLSCAASGLTFEWYWMGWVRQAPGKGLEWVSAVSGSGGSTYYADSVKGRFTISRDNSKNTLYLQMNSLRAEDAAVYYCAKVKLGGGPNFGYRGQGTLVTVSS

SEQ ID NO: 838 - protein, 120 aa, Homo sapiens
EVQLLESGGGLVQPGGSLRLSCAASGLTFEWYWMGWVRQAPGKGLEWVSAISGSGDSTYYADSVKGRFTISRDNSKNTLYLQMNSLRAEDAAVYYCAKVKLGGGPNFGYRGQGTLVTVSS

SEQ ID NO: 839 - protein, 120 aa, Homo sapiens
EVQLLESGGGLVQPGGSLRLSCAASGFTFEWYWMGWVRQAPGKGLEWVSAMSGSGGSTYYADSVKGRFTISRDNSKNTLYLQMNSLRAEDAAVYYCAKVKLGGGPNFGNRGLGTLVTVSS

SEQ ID NO: 840 - protein, 120 aa, Homo sapiens
EVQLLESGGGSVQPGGSLRLSCAASGFTFDWYWMGWVRQAPGKGLEWASAISGSGGSTYYADSVKDRFTISRDNSKNTLYLQMNSLRAEDAAVYYCAKVKLGGGPDFGYRGQGTLVTVSS

SEQ ID NO: 841 - protein, 120 aa, Homo sapiens
EVQLLESGGGLVQPGGSLRLSCAASGFTFEWYWMGWVRQAPGKGLEWVSAISGSGGSTYYADSVKGRFTISRDNSKNTLYLQMNSLRAEDGAVYYCAKVKLGGELNFGYRGQGTLVTVSS

SEQ ID NO: 842 - protein, 120 aa, Homo sapiens
EVQLLESGGGLVQPGGSLRLSCAASGFTFEWYWMGWVRQAPGKGLEWVSAISGSGGSTYYADSVKGRFTISRDNSKNTLYLQMNSLRAEDAAVYYCAKVKLGGGPNFGNRGQGTPVTVSS

SEQ ID NO: 843 - protein, 120 aa, Homo sapiens
EVQLLESGGGLVQPGGSLRLSCAASGFTFEWYWMGWVRQAPGKGLEWVSAISGSGGSTYYADSVKGRFTISRDNSKNTLYLQMNSLRPEDAAVYYCAKVKLGGGPNFGPRGQGTLVTVSS

SEQ ID NO: 844 - protein, 120 aa, Homo sapiens
EVQLLESGGGLVQPGGSLRLSCAASGFTFEWYWMGWVRQAPGKGLEWVSAISGSGGSTYYADSVKGRFTISRDNSKNTLYLQMNSLRAEDAAVYYCAKVKLGGGPNFGNRGQGTLVTVSS

SEQ ID NO: 845 - protein, 120 aa, Homo sapiens
EVQLLESGGGLVQPGGSLRLSCAASGFTIEWYWMGWVRQAPGKGLEWVSAISGSGGSTYYADSVKGRFTISRDNSKNTLYLQMNSLRAEDAAVYYCAKVKLGGGPNFGYRGQGTLVTVSS

SEQ ID NO: 846 - protein, 120 aa, Homo sapiens
EVQLLESGGGLVQPGGSLRLSCAASGFTFEWYWMGWVRQAPGKGLEWVSAISGSGGSTFYADSVKGRFTISRDNSKNTLYLQMNSLRAEDAAVYYCAKVKLGGGPNFGYRGQGTLVTVSS

SEQ ID NO: 847 - protein, 120 aa, Homo sapiens
EVQLLESGGGLVQPGGSLRLSCAASGFTFEWYWMGWVRQAPGKGLEWVTAISGSGGSTFYADSVKGRFTISRDNSKNTLYLQMNSLRAEDAAVYYCAKVKLGGGPNFGYRGQGTLVTVSS

SEQ ID NO: 848 - protein, 120 aa, Homo sapiens
EVQLLESGGGLVQPGGSLRLSCAASGFSFEWYWMGWVRQAPGKGLEWVSAISGSGDSTYYADSVKGRFTISRDNSKNTLYLQMNSLRAEDAAVYYCAKVKLGGGPNFGYRGQGTLVTVSS

SEQ ID NO: 849 - protein, 120 aa, Homo sapiens
EVQLLESGGGLVQPGGSLRLSCAASGFPFEWYWMGWVRQAPGKGLEWVSAISGSGDSTYYADSVKGRFTISRDNSKNTLYQQMNSLRAEDAAVYYCAKVKLGGGPNFGYRGQGTLVTVSS

SEQ ID NO: 850 - protein, 120 aa, Homo sapiens
EVQLLESGGGLVQPGGSLRLSCAASGFSFEWYWMGWVRQAPGKGLEWVSAISGSGGSTYYADSVKGRFTISRDNSKNTLYLQMNSLRAEDAAVYYCAKVKLGGGPNFGYRGQGTLVTVSS

SEQ ID NO: 851 - protein, 120 aa, Homo sapiens
EVQLLESGGGLVQPGGSLRLSCAASGFTFEWYWMGWVRQAPGKGLEWVSAISGSGGSTYYADSVKGRFTISRDNSKNTLYLQMNSLRAEDAAVYYCAKVKLGGGPNYGYRGQGTLVTVSS

SEQ ID NO: 852 - protein, 119 aa, Homo sapiens
EVQLLESGGGLVQPGGSLRLSCAASGFTFPEYGMAWVRQAPGKGLEWVSTISHGGEHTYYADSVKGRFTISRDNSKNTLYLQMNSLRAEDTAVYYCAQHPVSHPKFDYWGQGTLVTVSS

SEQ ID NO: 853 - protein, 116 aa, Homo sapiens
EVQLLESGGGLVQPGGSLRLSCAASGFTFDAYNMFWVRQAPGKGLEWVSAISPSGRETYYADSVKGRFTISRDNSKNTLYLQMNSLRAEDTAVYYCAKRYPDFDYWGQGTLVTVSS

SEQ ID NO: 854 - protein, 119 aa, Homo sapiens
EVQLLESGGGLVQPGGSLRLSCAASGFTFSDYTMGWVRQAPGKGLEWVSLIDRPGNHTYYADSVKGRFTISRDNSKNTLYLQMNSLRAEDTAVYYCAKWGLNVEDFDYWGQGTLVTVSS

SEQ ID NO: 855 - protein, 120 aa, Homo sapiens
EVQLLESGGGLVQPGGSLRLSCAASGFTFIEYDMGWVRQAPGKGLEWVSMISSDGRLTYYADSVKGRFTISRDNSKNTLYLQMNSLRAEDTAVYYCAKTWDGLNRNFDYWGQGTLVTVSS

SEQ ID NO: 856 - protein, 119 aa, Homo sapiens
EVQLLESGGGLVQPGGSLRLSCAASGFTFIGYNMYWVRQAPGKGLEWVSFISPSGRETYYADSVKGRFTISRDNSKNTLYLQMNSLRAEDTAVYYCAKTLSADGRFDYWGQGTLVTVSS

SEQ ID NO: 857 - protein, 120 aa, Homo sapiens
EVQLLESGGGLVQPGGSLRLSCAASGFTFGSYDMGWVRQAPGKGLEWVSFIDVSGTLTYYADSVKGRFTISRDNSKNTLYLQMNSLRAEDTAVYYCAKTVELDGLDFDYWGQGTLVTVSS

SEQ ID NO: 858 - protein, 120 aa, Homo sapiens
EVQLLESGGGLVQPGGSLRLSCAASGFTFADYDMGWVRQAPGKGLEWVSFIDSSGSRTYYADSVKGRFTISRDNSKNTLYLQMNSLRAEDTAVYYCAKTAEIVNSRFDYWGQGTLVTVSS

SEQ ID NO: 859 - protein, 120 aa, Homo sapiens
EVQLLESGGGLVQPGGSLRLSCAASGFTFDKYQMGWVRQAPGKGLEWVSFIDSNGHHTYYADSVKGRFTISRDNSKNTLYLQMNSLRAEDTAVYYCAELDNLSITPFDYWGQGTLVTVSS

SEQ ID NO: 860 - protein, 120 aa, Homo sapiens
EVQLLESGGGLVQPGGSLRLSCAASGFTFAKYNMYWVRQAPGKGLEWVSAISPKGQHTYYADSVKGRFTISRDNSKNTLYLQMNSLRAEDTAVYYCAEGMGSDAITFDYWGQGTLVTVSS

SEQ ID NO: 861 - protein, 122 aa, Homo sapiens
EVQLLESGGGLVQPGGSLRLSCAASGFTFSDYTMGWARQAPGKGLEWVSFIDSDGLHTYYADSVKGRFTISRDNSKNTLYLQMNSLRAEDTAVYYCAQNPQYAYESSRFDYWGQGTLVTVSS

SEQ ID NO: 862 - protein, 121 aa, Homo sapiens
EVQLLESGGGLVQPGGSLRLSCAASGFTFLQYPMVWVRQAPGKGLEWVSSILAPGGPTYYADSVKGRFTISRDNSKNSLYLQMNSLRAEDTAVYYCAKHPTHTPHPNFDYWGQGTLVTVSS

SEQ ID NO: 863 - protein, 122 aa, Homo sapiens
EVQLLESGGGLVQPGGSLRLSCAASGFTFGGYRMAWVRQAPGKGLEWVSFIDSEGVLTYYADSVKGRFTISRDNSKNTLYLQMNSLRAEDTAVYYCAKLCSSNCNMRNFDYWGQGTLVTVSS

SEQ ID NO: 864 - protein, 124 aa, Homo sapiens
EVQLLESGGGLVQPGGSLRLSCAASGFTFPVYNMAWVRQAPGKGLEWVSFIAGNGQQTYYADSVKGRFTISRDNSKNTLYLQMNSLRAEDTAVYYCAKFASKVSPMSLTDFDYWGQGTLVTVSS

SEQ ID NO: 865 - protein, 124 aa, Homo sapiens
EVQLLESGGGLVQPGGSLRLSCAASGFTFHKYGMAWVRQAPGKGLEWVSFIDLAGLHTYYADSVRGRFTISRDNSKNTLYLQMNSLRAEDTAVYYCAKFATYSSGNEEQPFDYWGQGTLVTVSS

SEQ ID NO: 866 - protein, 123 aa, Homo sapiens
EVQLLESGGGLVQPGGSLRLSCAASGFTFSAYNMAWVRQAPGKGLEWVSFIAQSGGHTYYADSVKGRFTISRDNSKNTLYLQMNSLRAEDTAVYYCAKFSHPDEEGTQMFDYWGQGTLVTVSS

SEQ ID NO: 867 - protein, 116 aa, Homo sapiens
EVQLLESGGGLVQPGGSLRLSCAASGFTFATYNMSWVRQAPGKGLEWVSAIDAGGMHTYYADSVKGRFTISRDNSKNTLYLQMNSLRAEDTAVYYCAKGTEPFDYWGQGTLVTVSS

SEQ ID NO: 868 - protein, 116 aa, Homo sapiens
  VARIANT 33: Xaa = Any Amino Acid
EVQLLESGGGLVQPGGSLRLSCAASGFTFDEYXMGWVRQAPGKGLEWVSLISPRGSKTYYADSVKGRFTISRDNSKNTLYLQMNSLRAEDTAVYYCAKYKPPFDYWGQGTLVTVSS

SEQ ID NO: 869 - protein, 116 aa, Homo sapiens
EVQLLESGGGLVQPGGSLRLSCAASGFTFEDYPMAWVRQAPGKGLEWVSFIGLKGIHTYYADSVKGRFTISRDNSKNTLYLQMNSLRAEDTAVYYCAKDLNNFDYWGQGTLVTVSS

SEQ ID NO: 870 - protein, 119 aa, Homo sapiens
EVQLLESGGGLVQPGGSLRLSCAASGFTFGNGNMVWVRQAPGKGLEWVSHIDEYGTNTYYADSVKGRFTISRDNSKNTLYLQMNSLRAEDTAVYYCAKPRNDRPGFDYWGQGTLVTVSS

SEQ ID NO: 871 - protein, 124 aa, Homo sapiens
EVQLLESGGGLVQPGGSLRLSCAASGFTFPTEHMYWVRQAPGKGLEWVSGIDTGGSHTYYADSVKGRFTISRDNSKNTLYLQMNSLRAEDTAVYYCAKGLHWSSDSGPVHFDYWGQGTLVTVSS

SEQ ID NO: 872 - protein, 121 aa, Homo sapiens
EVQLLESGGGLVQPGGSLRLSCAASGFTFGNVDMHWVRQAPGKGLEWVSAISSAGGETYYADSVKGRFTISRDNSKNTLYLQMNSLRAEDTAVYYCAKRMLANSPLAFDYWGQGTLVTVSS

SEQ ID NO: 873 - protein, 116 aa, Homo sapiens
EVQLLESGGGLVQPGGSLRLSCAASGFTFGYEPMAWVRQAPGKGLEWVSTISHTGRDTYYADSVKGRFTISRDNSKNTLYLQMNSLRAEDTAVYYCAKRWSSFDYWGQGTLVTVSS

SEQ ID NO: 874 - protein, 119 aa, Homo sapiens
EVQLLESGGGLVQPGGSLRLSCAASGFTFPSEKMAWVRQAPGKGLEWVSSIDERGIMTYYADSVKGRFTISRDNSKNTLYLQMNSLRAEDTAVYYCAKRWTFNTAFDYWGQGTLVTVSS

SEQ ID NO: 875 - protein, 119 aa, Homo sapiens
EVQLLESGGGLVQPGGSLRLSCAASGFTFSRENMHWVRQAPGKGLEWVSGIGPRGMPTYYADSVKGRFTISRDNSKNTLYLQMNSLRAEDTAVYYCAKGMNSHDGFDYWGQGTLVTVSS

SEQ ID NO: 876 - protein, 119 aa, Homo sapiens
EVQLLESGGGLVQPGGSLRLSCAASGFTFNAYTMIWVRQAPGKGLEWVSYIDPHGTITYYADSVKGRFTISRDNSKNTLYLQMNSLRAEDTAVYYCAKLPRAAPRFDYWGQGTLVTVSS

SEQ ID NO: 877 - protein, 119 aa, Homo sapiens
EVQLLESGGGLVQPGGSLRLSCAASGFTFDASEMDWVRQAPGKGLEWVSAISPSGSATYYADSVKGRFTISRDNSKNTLYLQMNSLRAEDTAVYYCAKWTPGRTTFDYWGQGTLVTVSS

SEQ ID NO: 878 - protein, 124 aa, Homo sapiens; identical to SEQ ID NO: 871

SEQ ID NO: 879 - protein, 123 aa, Homo sapiens
EVQLLESGGGLVQPGGSLRLSCAASGFTFKLYNMAWVRQAPGKGLEWVSFIAAAGPETYYADSVKGRFTISRDNSKNTLYLQMNSLRAEDTAVYYCAKLGDISSIPQHPFDYWGQGTLVTVSS

SEQ ID NO: 880 - protein, 119 aa, Homo sapiens
EVQLLESGGGLVQPGGSLRLSCAASGFTFGNVDMHWVRQAPGKGLEWVSAISSAGGETYYADSVKGRFTISRDNSKNTLYLQMNSLRAEDTAVYYCAKSADITKGFDYWGQGTLVTVSS

SEQ ID NO: 881 - protein, 121 aa, Homo sapiens
EVRLLESGGGLVQPGGSLRLSCAASGFTFGKYTMTWVRQAPGKGLEWVSHISDDGNSTYYADSVKGRFTISRDNSKNTLYLQMNSLRAEDTAVYYCAKVPILAPRNLFDYWGQGTLVTVSS

SEQ ID NO: 882 - protein, 119 aa, Homo sapiens
EVQLLESGGGLIQPGGSLRLSCAASGFTFAHETMVWVRQAPGKGLEWVSHIDRVGQDTYYADSVKGRFTISRDNSKNTLYLQMNSLRAEDTAVYYCAKLPKRGPWFDYRGQGTLVTVSS

SEQ ID NO: 883 - protein, 119 aa, Homo sapiens
EVQLLESGGGLIQPGGSLRLSCAASGFTFAHETMVWVRQAPGKGLEWVSHIDRVGQDTYYADSVKGRFTISRDNSKNTLYLQMNSLRAEDTAVYYCARLPKRGPWFDYRGQGTLVTVSS

SEQ ID NO: 884 - protein, 121 aa, Homo sapiens
EVRLLESGGGLVQPGGSLRLSCVASGFTFGKSTMTWVRQAPGKGLEWVSHISDDGNSTYYADSVKGRFTISRDNSKNTLYLQMNSLRAEDTAVYYCAKVPILAPRNLFDYWGQGTLVTVSS

SEQ ID NO: 885 - protein, 121 aa, Homo sapiens
EVRLLESGGGLVQPGGSLRLSCVASGFNFGKSTMTWVRQAPGKGLEWVSHISDDGNSTYYADSVKGRFTISRDNSKNTLYLQMNSLRAEDTAVYYCAKVPILAPRNLFDYWGQGTLVTVSS

SEQ ID NO: 886 - protein, 121 aa, Homo sapiens
EVRLLESGGGLVQPGGSLRLSCVASGFTFGKGTMTWVRQAPGKGLEWVSHISDDGNSTYYADSVKGRFTISRDNSKNTLYLQMNSLRAEDTAVYYCAKVPILAPRNLFDYWGQGTLVTVSS

SEQ ID NO: 887 - protein, 122 aa, Homo sapiens
  VARIANT 62: Xaa = Any Amino Acid
EVQLLESGGGLVQPGGSLRLSCAASGFTFARYNMGWVRQAPGKGLEWVSLIDPSGGHTYYAXSVKGRSTISRNNSKNTLYLQMNSLRAEDTAVYYCGKPVFSDWPAVEFDYWGQGTLVTVSS

SEQ ID NO: 888 - protein, 119 aa, Homo sapiens
EVQLLESGGGMVQPGGSLRLSCAAPGFTFEHEGMVWVRQAPGKGLEWVSHIGEDGQSTYYADSVKGRFTISRDNSKNTLYLQMNSLRAEDTAVYYCASIPKAGPSFDYWGQGTLVTVSS

SEQ ID NO: 889 - protein, 122 aa, Homo sapiens
EVQLLESGGGLVQPGGSLRLSCAASGSTFDQYDMSWVRRAPGKGLEWVSLIDPSGGHTYYADSVKGRFTISRNNTKNTLYLQMNSLRAEDTAVYYCAKPVFSDWPAVEFDYWGQGTLVTVSS

SEQ ID NO: 890 - protein, 121 aa, Homo sapiens
EVQLLESGGGLVQPGGSLRLSCAASGFTFDYGNMFWVRQAPGKGLEWISAISGSGGSTYYADSVKGRFTISRDNSKNTLYLQMNSLRAEDTAVYYCAKDMTTDSPPGFDYWGQGTLVTVSS

SEQ ID NO: 891 - protein, 122 aa, Homo sapiens
EVQLLESGGGLVQPGGSLRLSCAASGFTFAKETMSWVRQAPGKGLEWVSWISPHGAHTFYADSVKGRFTISRDNSKNTLYLQMNSLRAEDTAVYYCAKPRFSYYPRVSFDYRGQGTLVTVSS

SEQ ID NO: 892 - protein, 116 aa, Homo sapiens
EVQLLESGGGLVQPGGSLRLSCAASGFTFDAYNMFWFRQAPGKGPEWVSAIGPSGRETYYADSVKGRFTITRDNSKNTLYLQMNSLRAEDTAVYYCAKRYPDFDYWGQGTLVTVSS

SEQ ID NO: 893 - protein, 119 aa, Homo sapiens
EVQLLESGGGLVQPGGSLRLSCAASGFTFEHEGMVWVRQAPGKGLEWVSHIGEDGQSTYYADSVKGRFTISRDNSRNTLYLQMNSLRAEDTAVYYCANIPKAGPSFDYWGQGTLVTVSS

SEQ ID NO: 894 - protein, 123 aa, Homo sapiens; identical to SEQ ID NO: 879

SEQ ID NO: 895 - protein, 119 aa, Homo sapiens; identical to SEQ ID NO: 875

SEQ ID NO: 896 - protein, 121 aa, Homo sapiens
EVQLLESGGGLVQPGGSLRLSCAASGFTFDASEMDWVRQAPGKGLEWVSAISPSGSATYYADSVKGRFTISRDNSKNTLYLQMNSLRAEDTAVYYCAKRMLANSPLAFDYWGQGTLVTVSS

SEQ ID NO: 897 - protein, 123 aa, Homo sapiens; identical to SEQ ID NO: 866

SEQ ID NO: 898 - protein, 120 aa, Homo sapiens
EVQLLESGGGLVQPGGSLRLSCAASGFTFADYQMAWVRQAPGKGLEWVSRIDRGGFHTYYADSVKGRFTISRDNSKNTLYLQMNSLRAEDTAVYYCAKPSWHADQYFDYWGQGTLVTVSS

SEQ ID NO: 899 - protein, 120 aa, Homo sapiens
EVQLLESGGGLVQPGGSLRLSCAASGFTFKDYNMMWVRQAPGKGLEWVSAIATSGRETYYADSVKGRFTISRDNSKNTLYLQMNSLRAEDTAVYYCAKFTFGGNQDFDYWGQGTLVTVSS

SEQ ID NO: 900 - protein, 120 aa, Homo sapiens; identical to SEQ ID NO: 860

SEQ ID NO: 901 - protein, 123 aa, Homo sapiens; identical to SEQ ID NO: 866

SEQ ID NO: 902 - protein, 122 aa, Homo sapiens
EVQLLESGGGLVQPGGSLRLSCAASGFTFERYDMFWVRQAPGKGLEWVSGISPRGRETYYADSVKGRFTISRDNSKNTLYLQMNSLRAEDTAVYYCAKDMINYHGTPSFDYWGQGTLVTVSS

SEQ ID NO: 903 - protein, 122 aa, Homo sapiens
  VARIANT 30: Xaa = Any Amino Acid
EVQLLESGGGLVQPGGSLRLSCAASGFTFXNYNMVWVRQAPGKGLEWVSWISGAGHSTYYADSVKGRFTISRDNSKNTLYLQMNSLRAEDTAVYYCAKDVDMAGKLNVFDYWGQGTLVTVSS

SEQ ID NO: 904 - protein, 122 aa, Homo sapiens
EVQLLESGGGLVQPGGSLRLSCAASGFTFKQYNMYWVRQAPGKGLEWVSFISPSGGETYYADSVKGRFTTSRDNSKNTLYLQMNSLRAEDTAVYYCAKDVDMAGKLNVFDYWGQGTLVTVSS

SEQ ID NO: 905 - protein, 120 aa, Homo sapiens; identical to SEQ ID NO: 898

SEQ ID NO: 906 - protein, 120 aa, Homo sapiens
EVQLLESGGGLVQPGGSLRLTCAASGFTFDDVNMTWVRQAPGKGLEWVSAIGPSGTETYYADSVKGRFTISRDNSKNTLYLQMNSLRAEDTAVYYCAKHSKTGSAMFDYWGQGTLVTVSS

SEQ ID NO: 907 - protein, 119 aa, Homo sapiens; identical to SEQ ID NO: 870

SEQ ID NO: 908 - protein, 119 aa, Homo sapiens; identical to SEQ ID NO: 875

SEQ ID NO: 909 - protein, 117 aa, Homo sapiens
EVQLLESGGGLVQPGGSLRLSCAASGFTFKGSNMGWVRQAPGKGLEWVSLIDGRGQHTYYADSVKGRFTISRDNSKNTLYLQMNSLRAEDTAVYYCAKPSVREFDYRGQGTLVTVSS

SEQ ID NO: 910 - protein, 121 aa, Homo sapiens
EVQLLESGGGLVQPGGSLRLSCAASGFTFSRENMHWVRQAPGKGLEWVSGIGPRGMPTYYADSVKGRFTISRDNSKNTLYLQMNSLRAEDTAVYYCAKRMLANSPLAFDYWGQGTLVTVSS

SEQ ID NO: 911 - protein, 116 aa, Homo sapiens
EVQLLESGGGLVQPGGSLRLSCTASGFTFSESTMNWVRQAPGKGLEWVSVITAQGGDTYYADSVKGRFTISRDNSKNTLYLQMNSLRAEDTAVYYCAKPDVLFDYWGQGTLVTVSS

SEQ ID NO: 912 - protein, 117 aa, Homo sapiens
EVQLLESGGGLVQPGGSLRLSCAASGFTFEEYNMLWVRQAPGKGLEWVSGIGPSGRETYYADSVKGRFTISRDNSKNTLYLQMNSLRAEDTAVYYCAKGSITLFDYWGQGTLVTVSS

SEQ ID NO: 913 - protein, 124 aa, Homo sapiens
EVQLLESGGGLVQPGGSLRLSCAASGFTFSGYNMYWVRQAPGKGLEWVSAIDAYGTHTYYADSVKGRFTISRDNSKNTLYLQMNSLRAEDTAVYYCAEGLQTSDHGERISFDYWGQGTLVTVSS

SEQ ID NO: 914 - protein, 122 aa, Homo sapiens; identical to SEQ ID NO: 787

SEQ ID NO: 915 - protein, 122 aa, Homo sapiens; identical to SEQ ID NO: 787

SEQ ID NO: 916 - protein, 120 aa, Homo sapiens
EVQLLESGGGLVQPGGSLRLSCAASGFTFTRYSMGWVRQAPGKGLEWVSMIDVPGLHTYYADSVKGRFTISRDNSKNTLYLQMNSLRAEDTAVYYCAKISQFGSNAFDYWGQGTLVTVSS

SEQ ID NO: 917 - protein, 120 aa, Homo sapiens
  VARIANT 62, 104: Xaa = Any Amino Acid
EVQLLESGGGLVQPGGSLRLSCAASGFTFEWYWMGWVRQAPGKGLEWVSAISGSGGSTYYAXSVKGRFTISRDNSKNTLYLQMNSLRAEDAAVYYCAKVKLGGXPNFGYRGQGTLVTVSS

SEQ ID NO: 918 - protein, 120 aa, Homo sapiens
EVQLLESGGGLVQPGGSLRLSCAASGFTFTRYSMGWVRQAPGKGLEWVSFIDPPSVHTYYADSVKGRFTISRDNSKNTLYLQMNSLRAEDTAVYYCAKISQFGSNAFDYWGQGTLVTVSS

SEQ ID NO: 919 - protein, 120 aa, Homo sapiens
  VARIANT 62: Xaa = Any Amino Acid
EVQLLESGGGLVQPGGSLRLSCAASGFTFTRYSMGWVRQAPGKGLEWVSMIDVGGSHTYYAXSVKGRFTISRDNSKNTLYLQMNSLRAEDTAVYYCAKISQFGSNAFDYWGQGTLVTVSS

SEQ ID NO: 920 - protein, 120 aa, Homo sapiens
  VARIANT 62: Xaa = Any Amino Acid
EVQLLESGGGLVQPGGSLRLSCAASGFTFTRYSMGWVRQAPGKGLEWVSMIDTGGVHTYYAXSVKGRFTISRDNSKNTLYLQMNSLRAEDTAVYYCAKISQFGSNAFDYWGQGTLVTVSS

SEQ ID NO: 921 - protein, 120 aa, Homo sapiens
EVQLLESGGGLVQPGGSLRLSCAASGFTFTRYSMGWVRQAPGKGLEWVSMIDVPGRHTYYADSVKGRFTISRDNSKNTLYLQMNSLRAEDTAVYYCAKISQFGSNAFDYWGQGTLVTVSS

SEQ ID NO: 922 - protein, 120 aa, Homo sapiens
EVQLLESGGGLVQPGGSLRLSCAASGFTFTRYSMGWVRQAPGKGLEWVSMIAHAGPETYYADSVKGRFTISRDNSKNTLYLQMNSLRAEDTAVYYCAKISQFGSNAFDYWGQGTLVTVSS

SEQ ID NO: 923 - protein, 120 aa, Homo sapiens
EVQLLESGGGLVQPGGSLRLSCAASGFTFTRYSMGWVRQAPGKGLEWVSMIDTRGVRTYYADSVKGRFTISRDNSKNTLYLQMNSLRAEDTAVYYCAKISQFGSNAFDYWGQGTLVTVSS

SEQ ID NO: 924 - protein, 120 aa, Homo sapiens
EVQLLESGGGLVQPGGSLRLSCAASGFTFTRYSMGWVRQAPGKGLEWVSMIDVPGNHTYYADSVKGRFTISRDNSKNTLYLQMNSLRAEDTAVYYCAKISQFGSNAFDYWGQGTLVTVSS

SEQ ID NO: 925 - protein, 120 aa, Homo sapiens
EVQLLESGGGLVQPGGSLRLSCAASGFTFTRYSMGWVRQAPGKGLEWVSMIDVGGRHTYYADSVKGRFTISRDNSKNTLYLQMNSLRAEDTAVYYCAKISQFGPNAFDYWGQGTLVTVSS

SEQ ID NO: 926 - protein, 118 aa, Homo sapiens
EVQLLESGGGSVQPGGSLRLSCAASGFTFTRYSMGWVRQAPGKGLEWVSRIDSYGRGTYYADSVKGRFTISRDNSKNTLYLQMNSLRAEDTAVYYCAKVRSPYTFDYWGQGTLVTVSS

SEQ ID NO: 927 - protein, 117 aa, Homo sapiens
EVQLLESGGGLVQPGGSLRLSCAASGFTFSGYNMGWVRQAPGKGLEWVSTISTQGYHTYYADSVKGRFTISRDNSKNTLYLQMNSLRAEDTAVYYCAKAFTSDFDYWGQGTLVTVSS

SEQ ID NO: 928 - protein, 119 aa, Homo sapiens
EVQLLESGGGLVQPGGSLRLSCAASGFTFSGYNMYWVRQAPGKGLEWVSGISGPGLETYYADSVKGRFTISRDNSKNTLYLQMNSLRAEDTAVYYCAQGMSKTSTFDYWGQGTLVTVSS

SEQ ID NO: 929 - protein, 117 aa, Homo sapiens
EVQLLESGGGLVQPGGSLRLSCAASGFTFTEYYMEWVRQAPGKGLEWVSSIDPDGSLTYYADSVKGRFTISRDNSKNTLYLQMNSLRAEDTAVYYCAKYPREKFDYWGQGTLVTVSS

SEQ ID NO: 930 - protein, 120 aa, Homo sapiens
EVQLLESGGGLVQPGGSLRLSCAASGFTFDKYQMGWVRQAPGKGLEWVSFIDSNGHHTYYADSVKGRFTISRDNSKNTLYLQMNSLRAEDTAVYYCAQLSVQGSNLFDYWGQGTLVTVSS

SEQ ID NO: 931 - protein, 120 aa, Homo sapiens
EVQLLESGGGLVQPGGSLRLSCAASGFTFVHYTMGWVRQAPGKGLEWVSWIHSDGVHTYYADSVKGRFTISRDNSKNTLYLQMNSLRAEDTAVYYCAKFTWGEKKTFDYWGQGTLVTVSS

SEQ ID NO: 932 - protein, 120 aa, Homo sapiens
EVQLLESGGGLVQPGGSLRLSCAASGFTFMGYDMHWVRQAPGKGLEWVSGISAKGTETYYADSVKGRFTISRDNSKNTLYLQMNSLRAEDTAVYYCAKGSSGSDGLFDYWGQGTLVTVSS

SEQ ID NO: 933 - protein, 124 aa, Homo sapiens; identical to SEQ ID NO: 864

SEQ ID NO: 934 - protein, 124 aa, Homo sapiens
EVQLLESGGGLVQPGGSLRLSCAASGFTFVQYNMHWVRQAPGKGLEWVSGISSGGMRTYYADSVKGRFTISRDNSKNTLYLQMNSLRAEDTAVYYCAKGIRDSTLPRGTLFDYWGQGTLVTVSS

SEQ ID NO: 935 - protein, 121 aa, Homo sapiens
EVQLLESGGGLVQPGGSLRLSCAASGFTFETYSMHWVRQAPGKGLEWVSSISLPGSRTYYADSVKGRFTISRDNSKNTLYLQMNSLRAEDTAVYYCAKHSKSSHRQSFDYWGQGTLVTVSS

SEQ ID NO: 936 - protein, 122 aa, Homo sapiens
EVQLLESGGGLVQPGGSLRLSCAASGFTFNQYDMHWVRQAPGKGLEWVSGISFSGYETYYADSVKGRFTISRDNSKNTLYLQMNSLRAEDTAVYYCAKGRGPAPMRSLFDYWGQGTLVTVSS

SEQ ID NO: 937 - protein, 120 aa, Homo sapiens
EVQLLESGGGLVQPGGSLRLSCAASGFTFVDYPMVWVRQAPGKGLEWVSHITSMGESTYYADSVKGRFTISRDNSKNMLYLQMNSLRAEDTAVYYCAKLPTHFPIRFDYWGQGTLVTVSS

SEQ ID NO: 938 - protein, 116 aa, Homo sapiens
EVQLLESGGGLVQPGGSLRLSCAASGFTFKQYNMYWVRQAPGKGLEWVSFISPSGGETYYADSVKGRFTISRDNSKNTLYLQMNSLRAEDTAVYYCAKSIKPFDYWGQGTLVTVSS

SEQ ID NO: 939 - protein, 120 aa, Homo sapiens
EVQLLESGGGLVQPGGSLRLSCAASGFTFSMYSMAWVRQAPGKGLEWVSFIDFDGLHTYYADSVKGRFTISRDNSKNTLYLQMNSLRAEDTAVYYCAKFSTSTMALFDYWGQGTLVTVSS

SEQ ID NO: 940 - protein, 122 aa, Homo sapiens
EVQLLESGGGLVRPGGSLRLSCAASGFTFPEYNMHWVRQAPGKGLEWVSAIGTAGGSTYYADSVKGRFTISRDNSKNMLYLQMNSLRAEDTAVYYCAKGYRPRTGSMLFDYWGQGTLVTVSS

SEQ ID NO: 941 - protein, 120 aa, Homo sapiens
EVQLLESGGGLVQPGGSLRLSCAASGFTFAKYNMYWVRQAPGKGLEWVSAISPKGQQTYYADSVKGRFTISRDNSKNTLYLQMNSLRAEDTAVYYCAEGMGSDAITFDYWGQGTLVTVSS

SEQ ID NO: 942 - protein, 122 aa, Homo sapiens
EVQLLESGGGLVQPGGSLRLSCAASGFTFADYDMAWVRQAPGKGLEWVSFIDRKGHHTYYADSVKGRFTISRDNSKNTLYLQMNSLRAEDTAVYYCAKTTDIQRLNSAFDYWGQGTLVTVSS

SEQ ID NO: 943 - protein, 119 aa, Homo sapiens
EVQLLESGGGLVQPGGSLRLSCAASGFTFGNGVMAWVRQAPGKGLEWVSHINENGGATYYADSVKGRFTISRDNSKNTLYLQMNSLRAEDTAVYYCAKPSIESPIFDYWGQGTLVTVSS

SEQ ID NO: 944 - protein, 119 aa, Homo sapiens
EVQLLESGGGLVQPGGSLRLSCAASGFTFAHEPMVWVRQAPGKGLEWVSHIDRVGQDTYYADSVKGRFTISRDNSKNTLYLQMNSLRAEDTAVYYCAKLPKRGPRFDYWGQGTLVTVSS

SEQ ID NO: 945 - protein, 121 aa, Homo sapiens
EVQLLESGGGLVQPGGSLRLSCAASGFTFEESVMGWVRQAPGKGLEWVSAISPGGSETYYADSVKGRFTISRDNSKNTLYLQMNSLRAEDAAVYYCAKRTGPPGSTVFDYWGQGTLVTVSS

SEQ ID NO: 946 - protein, 116 aa, Homo sapiens
EVQLLESGGGLVQPGGSLRLSCAASGFTFGDEPMHWVRQAPGKGLEWVSGIGKEGQPTYYADSVKGRFTISRDNSKNTLYLQMNSLRAEDTAVYYCAKLGGPFDYWGQGTLVTVSS

SEQ ID NO: 947 - protein, 121 aa, Homo sapiens
EVQLLESGGGLVQPGGSLRLSCAASGFTFDYGNMFWVRQAPGKGLEWVSAISGSGGSTYYADSVKGRFTISRDNSKNTLYLQMNSLRAEDTAVYYCAKDMTTDSPPGFDYWGQGTLVTVSS

SEQ ID NO: 948 - protein, 122 aa, Homo sapiens
EVQLLESGGGLVQPGGSLRLSCAASGFTFAKETMSWVRQAPGKGLEWVSWISPHGALTYYADSVKGRFTISRDNSKNTLYLQMNSLRAEDTAVYYCAKPRFSYYPRVSFDYWGQGTLVTVSS

SEQ ID NO: 949 - protein, 119 aa, Homo sapiens; identical to SEQ ID NO: 870

SEQ ID NO: 950 - protein, 119 aa, Homo sapiens
  VARIANT 53: Xaa = Any Amino Acid
EVQLLESGGGLVQPGGSLRLSCAASGFTFGNGNMVWVRQAPGKGLEWVSHIDXYGTNTYYADSVKGRFTISRDNSKNTLYLQMNSLRAGDTAVYYCAKPRNDRPGFDYWGQGTLVTVSS

SEQ ID NO: 951 - protein, 124 aa, Homo sapiens
EVQLLESGGGLVQPGGSLRLSCAASGFTFAGQDMRWVRQAPGKGLEWVSSIPSSGFNTYYADSVKGRFTISRDNSKNTLYLQMNSLRAEDTAVYYCAKRAKDRSVSQMPYFDYWGQGTLVTVSS

SEQ ID NO: 952 - protein, 120 aa, Homo sapiens
EVQLLESGGGLVQPGGSLRLSCAASGFTFMRPDMVWVRQAPGKGLEWVSTIKDWGDQTYYADSVKGRFTISRDNSKNTLYLQMNSLRAEDAAVYYCAKADSRAQLDFDYWGQGTLVTVSS

SEQ ID NO: 953 - protein, 121 aa, Homo sapiens
EVQLLESGGGLVQPGGSLRLSCAASGFTFSSYAMSWVRQAPGKGLEWVSAISGSGGSTYYADSVKGRFTISRDNSKNTLYLQMNSLRAEDTAVYYCAKPYFLFRATSFDYWGQGTLVTVSS

SEQ ID NO: 954 - protein, 120 aa, Homo sapiens
EVQLLESGGGLVQPGGSLRLSCAASGFTFHDDDMVWVRQAPGKGLEWVSSIPGNGYVTYYADSVKGRFTISRDNSKNTLYLQMNSLRAEDTAVYYCAKRPDPTSVFFDYWGQGTLVTVSS

SEQ ID NO: 955 - protein, 116 aa, Homo sapiens
EVQLLESGGGLVQPGGSLRLSCAASGFTFGDDWMTWVRQAPGKGLEWVSGIAAYGISTYYADSVKGRFTISRDNSKNTLYLQMNSLRAEDAAVYYCAESGKVFDYWGQGTLVTVSS

SEQ ID NO: 956 - protein, 120 aa, Homo sapiens
EVQLLESGGGLVQPGGSLRLSCAASGFTFVERPMDWVRQAPGKGLEWVSLIGADGLSTYYADSVKGRFTISRDNSKNTLYLQMNSLRAEDTAVYYCAKLFRPGLLWFDYWGQGTLVTVSS

SEQ ID NO: 957 - protein, 119 aa, Homo sapiens
EVQLLESGGGLVQPGGSLRLSCAASGFTFTGQDMQWVRQAPGKGLEWVSGINADGMATYYADSVKGRFTISRDNSKNTLYLQMNSLRAEDTAVYYCAKTSPTMRSFDYWGQGTLVTVSS

SEQ ID NO: 958 - protein, 118 aa, Homo sapiens
EVQLLESGGGLVQPGGSLRLSCAASGFTFGEEYMQWVRQAPGKGLEWVSLIPHTGNPTYYADSVKGRFTISRDNSKNTLYLQMNSLRAEDTAVYYCAKLANSLLFDYWGQGTLVTVSS

SEQ ID NO: 959 - protein, 120 aa, Homo sapiens
EVQLLESGGGLVQPGGSLRLSCAASGFTFHRCKMGWVRQAPGKGLEWVSFIEYDGRDTYYADSVKGRFTISRDNSKNTLYLQMNSLRAEDTAVYYCAKECTRPYGMFDYWGQGTLVTVSS

SEQ ID NO: 960 - protein, 120 aa, Homo sapiens
EVQLLESGGGLVQPGGSLRLSCAASGFTFNRYSMGWLRQAPGKGLEWVSFIDKVGHHTWYEDPVKGRFTISRDNSKNTLYLQMNSLRAEDTAVYYCAKISQFGPNAFDYWGQGTQVTVSS

SEQ ID NO: 961 - protein, 120 aa, Homo sapiens
  VARIANT 101: Xaa = Any Amino Acid
EVQLLESGGGLVQPGGSLRLSCAASGFTFTRYSMGWVRQAPGKGLEWVSMIAHAGPERYYADSVKGRFTISRDNSKNTLYLQMNSLRAEDTAVYYCAKISXFGSNAFDYWGQGTLVTVSS

SEQ ID NO: 962 - protein, 120 aa, Homo sapiens
EVQLLESGGGLVQPGGSLRLSCAASGFTFTRYNMGWVRQAPGKGLEWVSFIDPPSVHTYYADSVKGRFTISRDNSKNTLYLQMNSLRAEDTAVYYCANISQFGSNAFDYWGQGTLVTVSS

SEQ ID NO: 963 - protein, 120 aa, Homo sapiens
  VARIANT 96: Xaa = Any Amino Acid
EVQLLESGGGLVQPGGSLRLSCAASGFTFTRYSMGWVRQAPGKGLEWVSFIDPPSVHTYYADSVKGRFTISRDNSKNTLYLQMNSLRAEDTAVYYXAEISQFGSNAFDYWGQGTLVTVSS

SEQ ID NO: 964 - protein, 120 aa, Homo sapiens
EVQLFESGGGLVQPGGSLRLSCAASGFTFTRYSMGWVRQAPGKGLEWVSMIAHAGPETYYADSVKGRFTISRDNSKNTLYLQMNSLRAEDTAVYYCAKISQFGSNALDYWGRGTLVTVSS

SEQ ID NO: 965 - protein, 122 aa, Homo sapiens
EVQLLESGGGLVQPGGSLRLSCAASGFTFARYNMGWVRQAPGKGLEWVSLIDPSGGHTYYADSVKGRFTISRNNSKNTLYLQMNSLRAEDTAVYYCGKPVFSDWPAVEFDYWGQGTVVTVSS

SEQ ID NO: 966 - protein, 119 aa, Homo sapiens
EVQLLESGGGMVQPGGSLRLSCAASGFTFEHEGMVWVRQAPGKGLEWVSHIGEDGQSTYYADSVKGRFTISRDNSKNTLYLQMNSLRAEDTAVYYCANIPKAGPSFDYWGQGTLVTVSS

SEQ ID NO: 967 - protein, 119 aa, Homo sapiens
EVQLLESGGGLVQPGGSLRLSCAASGFTFVKYSMGWVRQAPGKGLEWVSQISNTGGHTYYADSVKGRFTISRDNSKNTLYLQMNSLRAEDTAVYYCAKYTGRWEPFDYWGQGTLVTVSS

SEQ ID NO: 968 - protein, 120 aa, Homo sapiens
EVQLLESGGGLVQPGGSLRLSCAASGFTFEWYWMGWVRQAPGKGLEWVSAISGSGGSTYYADSVKGRFTISRDNSKNTLYLQMNSLRAEDTAVYYCAKVKLGGGPNFDYWGQGTLVTVSS

SEQ ID NO: 969 - protein, 115 aa, Homo sapiens
EVQLLESGGGLVQPGGSLRLSCAASGFTFDLYNMFWVRQAPGKGLEWVSFISQTGRLTWYADSVKGRFTISRDNSKNTLYLQMNSLRAEDTAVYYCAKTLEDFDYWGQGTLVTVS

SEQ ID NO: 970 - protein, 118 aa, Homo sapiens
EVQLLESGGGLVQPGGSLRLSCAASGFTFPVYMMGWVRQAPGKGLEWVSSIDALGGRTGYADSVKGRFTISRDNSKNTLYLQMNSLRAEDTAVYYCAKTMSNKTHTFDYWGQGTLVTS

SEQ ID NO: 971 - protein, 115 aa, Homo sapiens
  VARIANT 57: Xaa = Any Amino Acid
EVQLLESGGGLVQPGGSLRLSCAASGFTFVAYNMTWVRQAPGKGLEWVSSINTFGNXTRYADSVKGRFTISRDNSKNTLYLQMNSLRAEDTAVYYCAKGSRPFDYWGQGTLVTVS

SEQ ID NO: 972 - protein, 119 aa, Homo sapiens
  VARIANT 30: Xaa = Any Amino Acid
EVQLLESGGGLVQPGGSLRLSCAASGFTFXGYRMGWVRQAPGKGLEWVSWITRTGGTTQYADSVKGRFTISRDNSKNTLYLQMNSLRAEDTAVYYCAKPAKLVGVGFDYWGQGTLVTVS

SEQ ID NO: 973 - protein, 119 aa, Homo sapiens
  VARIANT 33: Xaa = Any Amino Acid
EVQLLESGGGLVQPGGSLRLSCAASGFTFRKYXMGWVRQAPGKGLEWVSQIGAKGQSTDYADSVKGRFTISRDNSKNTLYLQMNSLRAEDTAVYYCAKKKRGENYFFDYWGQGTLVTVS

SEQ ID NO: 974 - protein, 119 aa, Homo sapiens
EVQLLESGGGLVQPGGSLRLSCAASGFTFRRYSMSWVRQAPGKGLEWVSDISRSGRYTHYADSVKGRFTISRDNSKNTLYLQMNSLRAEDTAVYYCAKRIDSSQNGFDYWGQGTLVTVS

SEQ ID NO: 975 - protein, 115 aa, Homo sapiens
  VARIANT 30: Xaa = Any Amino Acid
EVQLLESGGGLVQPGGSLRLSCAASGFTFXGYKMFWVRQAPGKGLEWVSAISGSGGSTYYADSVKGRFTISRDNSKNTLYLQMNSLRAEDTAVYYCAKQKENFDYWGQGTLVTVS

SEQ ID NO: 976 - protein, 119 aa, Homo sapiens
EVQLLESGGGLVQPGGSLRLSCAASGFTFGDYAMWWVRQAPGKGLEWVSVISSNGGSTFYADSVKGRFTISRDNSKNTLYLQMNSLRAEDTAVYYCAKRVRKRTPEFDYWGQGTLVTVS

SEQ ID NO: 977 - protein, 119 aa, Homo sapiens
EVQLLESGGGLVQPGGSLRLSCAASGFTFRRYKMGWVRQAPGKGLEWVSAIGRNGTKTNYADSVKGRFTISRDNSKNTLYLQMNSLRAEDTAVYYCAKIYTGKPAAFDYWGQGTLVTVS

SEQ ID NO: 978 - protein, 119 aa, Homo sapiens
  VARIANT 33: Xaa = Any Amino Acid
EVQLLESGGGLVQPGGSLRLSCAASGFTFKKYXMSWVRQAPGKGLEWVSAISGSGGSTYYADSVKGRFTISRDNSKNTLYLQMNSLRAEDTAVYYCAKMLRTKNKVFDYWGQGTLVTVS

SEQ ID NO: 979 - protein, 119 aa, Homo sapiens; identical to SEQ ID NO: 977

SEQ ID NO: 980 - protein, 119 aa, Homo sapiens
  VARIANT 30: Xaa = Any Amino Acid
EVQLLESGGGLVQPGGSLRLSCAASGFTFXSYRMGWVRQAPGKGLEWVSSISSRGRHTSYADSVKGRFTISRDNSKNTLYLQMNSLRAEDTAVYYCAKRVPGRGRSFDYWGQGTLVTVS

SEQ ID NO: 981 - protein, 119 aa, Homo sapiens
EVQLLESGGGLVQPGGSLRLSCAASGFPFRRYRMRWVRQAPGKGLEWVSGISPGGKHTTYADSVKGRFTISRDNSKNTLYLQMNSLRAEDTAVYYCAKGEGGASSAFDYWGQGTLVTVS

SEQ ID NO: 982 - protein, 119 aa, Homo sapiens
  VARIANT 30: Xaa = Any Amino Acid
EVQLLESGGGLVQPGGSLRLSCAASGFTFXRYGMVWVRQAPGKGLEWVSAISGSGGSTYYADSVKGRFTISRDNSKNTLYLQMNSLRAEDTAVYYCAKRHSSEARQFDYWGQGTLVTVS

SEQ ID NO: 983 - protein, 108 aa, Homo sapiens
DIQMTQSPSSLSASVGDRVTITCRASQPIGVALNWYQQKPGKAPKLLIYGGSYLQSGVPSRYSGSGSGTDFTLTISSLQPGDFATYYCQQDWRYPGTFGQGTKVEIKR

SEQ ID NO: 984 - protein, 108 aa, Homo sapiens
DIQMTQSPSSLSASVGDRVTITCRASQYIHTSLQWYQQKPGKAPKLLIYGSSRLQSGVPSRFSGSGSGTDFTLTISSLQPEDFATYYCQQNHHSPFTFGQGTKVEIKR

SEQ ID NO: 985 - protein, 119 aa, Homo sapiens
EVQLLESGGGLVQPGGSLRLSCAASGFTFRKYDMHWVRQAPGKGLEWVSTISPSGRRTYYADSVKGRFTISRDNSKNTLYLQMNSLRAEDTAVYYCAENLDQVLSFDYWGQGTLVTVSS

SEQ ID NO: 986 - protein, 120 aa, Homo sapiens
EVQLLESGGGLVQPGGSLRLSCAASGFTFGSYSMSWVRQAPGKGLEWVSGIDNGGHSTYYADSVKGRFTISRDNSKNTLYLQMNSLRAEDTAVYYCAKRSSGLPFPFDYWGQGTLVTVSS

SEQ ID NO: 987 - protein, 120 aa, Homo sapiens
EVQLLESGGGLVQPGGSLRLSCAASGFTFTRYSMGWVRQAPGKGLEWVSRIDSYGRGTYYADSVKGRFTISRDNSKNTLYLQMNSLRAEDTAVYYCAKISQFGSNAFDYWGQGTLVTVSS

SEQ ID NO: 988 - protein, 108 aa, Homo sapiens
DIQMTQSPSSLSASVGDRVTITCRASQYIHSSLQWYQQKPGKAPKLLIYSSSRLHSGVPPRFSGSGSGTDFTLTISSLQPEDFATYYCQQNHFRPHTFGQGTKVEIKR

SEQ ID NO: 989 - protein, 120 aa, Homo sapiens
EVQLLESGGGLVQPGGSLRLSCAASGFTFNRYSMGWLRQAPGKGLEWVSRIDSYGRGTYYEDPVKGRFSISRDNSKNTLYLQMNSLRAEDTAVYYCAKISQFGSNAFDYWGQGTQVTVSS

SEQ ID NO: 990 - protein, 120 aa, Homo sapiens
EVQLLESGGGLVQPGGSLRLSCAASGFTFSRCSMGWLRQAPGKGLEWVSRIDSYGRGTYYADSVKGRFTISRDNSKNTLYLQMNSLRAEDTAVYYCAKISKFGSNAFDYWGQGTLVTVSS

SEQ ID NO: 991 - protein, 120 aa, Homo sapiens
EVQLLESGGGLVQPGGSLRLSCAASGFTFTRYSMGWLRQAPGKGLEWVSRIDSYGRGTYDADSVKGRFTISRDNSKNTLYLQMNSLRAEDTAVYYCAKISQFGSNAFDYWGQGTLVTVSS

SEQ ID NO: 992 - protein, 120 aa, Homo sapiens
EVQLLESGGGLIQPGGSLRLSCAASGFTFTRYSMGWLRQAPGKGLEWVSRIDSYGRGTYDTDSVKGRFTISRDNSRNTLYLQMNSLRAEDTAVYYCAKISQFGSNAFDYWGQGTLVTVSS

SEQ ID NO: 993 - protein, 120 aa, Homo sapiens
EVQLLESGGGLVQPGGSLRLSCAASGFTFTRYSMGWLRQAPGKGLEWVSRIDSYGRGTYYADSVKGRFTISRDNSKNTLYLQMNSLRAEDTAVYYCAKISQFGSNAFDYWGQGTLVTVSS

SEQ ID NO: 994 - protein, 120 aa, Homo sapiens
EVQLLESGGGLVQPGGSLRLSCAASGFTFTRYSMGWIRQAPGKGLEWVSRIDSYGRGTYYADSVKGRFTISRDNSKNTLYLQMNSLRAEDTAVYYCAKISQFGSNAFDYWGQGTLVTVSS

SEQ ID NO: 995 - protein, 120 aa, Homo sapiens
EVQLLESGGGLVQPGGSLRLSCAASGFTFTRYSMGWVRQAPGKGLEWVSRIDSYGRGTYYADSVKGRFTISRDNSKNTLYLQMNSLRAEDTAVYYCAKISQFGSNAFDYWGQGTVVTVSS

SEQ ID NO: 996 - protein, 182 aa, Homo sapiens
LVPHLGDREKRDSVCPQGKYIHPQNNSICCTKCHKGTYLYNDCPGPGQDTDCRECESGSFTASENHLRHCLSCSKCRKEMGQVEISSCTVDRDTVCGCRKNQYRHYWSENLFQCFNCSLCLNGTVHLSCQEKQNTVCTCHAGFFLRENECVSCSNCKKSLECTKLCLPQIENVKGTEDSGTT

SEQ ID NO: 997 - protein, 183 aa, Mus musculus
LVPSLGDREKRDSLCPQGKYVHSKNNSICCTKCHKGTYLVSDCPSPGRDTVCRECEKGTFTASQNYLRQCLSCKTCRKEMSQVEISPCQADKDTVCGCKENQFQRYLSETHFQCVDCSPCFNGTVTIPCKETQNTVCNCHAGFFLRESECVPCSHCKKNEECMKLCLPPPLANVTNPQDSGTA
